(19) United States
(12) Patent Application Publication
(10) Pub. No.: US 2010/0280224 A1
(43) Pub. Date: Nov. 4, 2010

(54) MARKER SEQUENCES FOR MULTIPLE SCLEROSIS AND USE THEREOF

(75) Inventors: Jens Beator, Kreiensen (DE); Angelika Lüking, Bochum (DE); Axel Kowald, Bochum (DE); Helmut Meyer, Recklinghausen (DE)

Correspondence Address: CONNOLLY BOVE LODGE & HUTZ, LLP, P O BOX 2207, WILMINGTON, DE, 19899, US

(73) Assignee: Protagen AG, Dortmund (DE)

(21) Appl. No.: 12/676,178

(22) PCT Filed: Sep. 3, 2008
(86) PCT No.: PCT/DE08/01546

§ 371 Date: Jun. 21, 2010

(30) Foreign Application Priority Data
Sep. 3, 2007 (DE) 10 2007 041 657.3

(51) Int. Cl. C07K 14/435; C07H 21/04

(52) U.S. Cl. 530/350; 536/23.5

(57) ABSTRACT

The present invention relates to new marker sequences for multiple sclerosis and the diagnostic use thereof together with a method for screening of potential active substances for multiple sclerosis by means of these marker sequences. Furthermore, the invention relates to a diagnostic device containing such marker sequences for multiple sclerosis, in particular a protein biochip and the use thereof.

[0001] The present invention relates to new marker sequences for multiple sclerosis and the diagnostic use thereof together with a method for screening potential active substances for multiple sclerosis by means of these marker sequences. Furthermore, the invention relates to a diagnostic device containing marker sequences of this type for multiple sclerosis, in particular a protein biochip and the use thereof.

[0002] Protein biochips are gaining increasing industrial importance in analysis and diagnosis as well as in pharmaceutical development. Protein biochips have become established as screening instruments.

[0003] The rapid and highly parallel detection of a multiplicity of specifically binding analysis molecules in a single experiment is rendered possible hereby. To produce protein biochips, it is necessary to have the required proteins available. For this purpose, in particular protein expression libraries have become established. The high throughput cloning of defined open reading frames is one possibility (Heyman, J. A., Cornthwaite, J., Foncerrada, L., Gilmore, J. R., Gontang, E., Hartman, K. J., Hernandez, C. L., Hood, R., Hull, H. M., Lee, W. Y., Marcil, R., Marsh, E. J., Mudd, K. M., Patino, M. J., Purcell, T. J., Rowland, J. J., Sindici, M. L. and Hoeffler, J. P., (1999) Genome-scale cloning and expression of individual open reading frames using topoisomerase I-mediated ligation. Genome Res, 9, 383-392; Kersten, B., Feilner, T., Kramer, A., Wehrmeyer, S., Possling, A., Witt, I., Zanor, M. I., Stracke, R., Lueking, A., Kreutzberger, J., Lehrach, H. and Cahill, D. J. (2003) Generation of Arabidopsis protein chip for antibody and serum screening. Plant Molecular Biology, 52, 999-1010; Reboul, J., Reboul, J., Vaglio, P., Rual, J. F., Lamesch, P., Martinez, M., Armstrong, C M., Li, S., Jacotot, L., Bertin, N., Janky, R., Moore, T., Hudson, J. R., Jr., Hartley, J. L., Brasch, M. A., Vandenhaute, J., Boulton, S., Endress, G. A., Jenna, S., Chevet, E., Papasotiropoulos, V., Tolias, P. P., Ptacek, J., Snyder, M., Huang, R., Chance, M. R., Lee, H., Doucette-Stamm, L., Hill, D. E. and Vidal, M. (2003) C. elegans ORFeome Version 1.1: experimental verification of the genome annotation and resource for proteome-scale protein expression. Nat Genet, 34, 35-41; Walhout, A. J., Temple, G. F., Brasch, M. A., Hartley, J. L., Lorson, M. A., van den Heuvel, S. and Vidal, M. (2000) GATEWAY recombinational cloning: application to the cloning of large numbers of open reading frames or ORFeomes. Methods Enzymol, 328, 575-592). However, an approach of this type is strongly connected to the progress of the genome sequencing projects and the annotation of these gene sequences. Furthermore, the determination of the expressed sequence can be ambiguous due to differential splicing processes. This problem may be circumvented by the application of cDNA expression libraries (Büssow, K., Cahill, D., Nietfeld, W., Bancroft, D., Scherzinger, E., Lehrach, H. and Walter, G. (1998) A method for global protein expression and antibody screening on high-density filters of an arrayed cDNA library. Nucleic Acids Research, 26, 5007-5008; Büssow, K., Nordhoff, E., Lübbert, C, Lehrach, H. and Walter, G. (2000) A human cDNA library for high-throughput protein expression screening. Genomics, 65, 1-8; Holz, C, Lueking, A., Bovekamp, L., Gutjahr, C, Bolotina, N., Lehrach, H. and Cahill, D. J. (2001) A human cDNA expression library in yeast enriched for open reading frames. Genome Res, 11, 1730-1735; Lueking, A., Holz, C, Gotthold, C, Lehrach, H. and Cahill, D. (2000) A system for dual protein expression in Pichia pastoris and Escherichia coli, Protein Expr. Purif., 20, 372-378). The cDNA of a particular tissue is hereby cloned into a bacterial or an eukaryotic expression vector, such as, e.g., yeast. The vectors used for the expression are generally characterized in that they carry inducible promoters that may be used to control the time of protein expression. Furthermore, expression vectors have sequences for so-called affinity epitopes or affinity proteins, which on the one hand permit the specific detection of the recombinant fusion proteins by means of an antibody directed against the affinity epitope, and on the other hand the specific purification via affinity chromatography (IMAC) is rendered possible.

[0004] For example, the gene products of a cDNA expression library from human fetal brain tissue in the bacterial expression system Escherichia coli were arranged in high-density format on a membrane and could be successfully screened with different antibodies. It was possible to show that the proportion of full-length proteins is at least 66%. Additionally, the recombinant proteins from the library could be expressed and purified in a high-throughput manner (Braun P., Hu, Y., Shen, B., Halleck, A., Koundinya, M., Harlow, E. and LaBaer, J. (2002) Proteome-scale purification of human proteins from bacteria. Proc Nall Acad Sci USA, 99, 2654-2659; Büssow (2000) supra; Lueking, A., Horn, M., Eickhoff, H., Büssow, K., Lehrach, H. and Walter, G. (1999) Protein microarrays for gene expression and antibody screening. Analytical Biochemistry, 270, 103-111). Protein biochips of this type based on cDNA expression libraries are in particular the subject matter of WO 99/57311 and WO 99/57312.

[0005] Furthermore, in addition to antigen-presenting protein biochips, antibody-presenting arrangements are likewise described (Lal et al (2002) Antibody arrays: An embryonic but rapidly growing technology, DDT, 7, 143-149; Kusnezow et al. (2003), Antibody microarrays: An evaluation of production parameters, Proteomics, 3, 254-264).

[0006] However, there is a great need to provide indication-specific diagnostic devices, such as a protein biochip.

[0007] Marker sequences and the diagnostic use thereof for multiple sclerosis, in particular in the embodiment of a protein biochip, as well as tests in this regard for the screening of active substances have not been described in the prior art.

[0008] The object of the present invention is therefore to provide marker sequences and their diagnostic use.

[0009] The provision of specific marker sequences permits a reliable diagnosis and stratification of patients with multiple sclerosis, in particular by means of a protein biochip.

[0010] The invention therefore relates to the use of marker sequences for the diagnosis of multiple sclerosis, wherein at least one marker sequence of a cDNA selected from the group SEQ 1-395 or respectively a protein coding therefor or respectively a partial sequence or fragment thereof (hereinafter: marker sequences according to the invention) is determined on or from a patient to be examined.

[0011] It was possible to identify the marker sequences according to the invention by means of differential screening of samples from healthy test subjects with patient samples with multiple sclerosis.

[0012] The term “multiple sclerosis (MS), also encephalomyelitis disseminata)” is defined, e.g., according to Pschyrembel, de Gruyter, 261st edition (2007), Berlin and relates to an autoimmune inflammatory/demyelinating and degenerative disorder of the central nervous system.

[0013] In a further embodiment at least 2 to 5 or 10, preferably 30 to 50 marker sequences or 50 to 100 or more marker sequences are determined on or from a patient to be examined.

[0014] In a particular embodiment of the invention, the marker sequences of the SEQ 1-20 are particularly preferred, the marker sequences SEQ 21-50 are preferred, and furthermore the marker sequences SEQ 51-100 are preferred.

[0015] In a further embodiment of the invention, the marker sequences SEQ 1-10 and SEQ 11-20, as well as preferably SEQ 21-30, SEQ 31-40 or SEQ 41-50 are respectively particularly preferred.

[0016] In a further embodiment of the invention, the marker sequences according to the invention can likewise be combined, supplemented, fused or expanded likewise with known biomarkers for this indication.

[0017] In a preferred embodiment, the determination of the marker sequences is carried out outside the human body and the determination is carried out in an ex vivo/in vitro diagnosis.

[0018] In a further embodiment of the invention, the invention relates to the use of marker sequences as diagnostic agents, wherein at least one marker sequence of a cDNA is selected from the group SEQ 1-395 or respectively a protein coding therefor or respectively a partial sequence or fragment thereof.

[0019] Furthermore, the invention relates to a method for the diagnosis of multiple sclerosis, wherein a.) at least one marker sequence of a cDNA selected from the group SEQ 1-395 or respectively a protein coding therefor or respectively a partial sequence or fragment thereof is applied to a solid support and b.) is brought into contact with body fluid or tissue extract of a patient and c.) the detection of an interaction of the body fluid or tissue extract with the marker sequences from a.) is carried out.

[0020] The invention therefore likewise relates to diagnostic agents for the diagnosis of multiple sclerosis respectively selected from the group SEQ 1-395 or respectively a protein coding therefor or respectively a partial sequence or fragment thereof.

[0021] The detection of an interaction of this type can be carried out, for example, by a probe, in particular by an antibody.

[0022] The invention therefore likewise relates to the object of providing a diagnostic device or an assay, in particular a protein biochip, which permits a diagnosis or examination for multiple sclerosis.

[0023] Furthermore, the invention relates to a method for the stratification, in particular risk stratification and/or therapy control of a patient with multiple sclerosis, wherein at least one marker sequence of a cDNA selected from the group SEQ 1-395 or respectively a protein coding therefor is determined on a patient to be examined.

[0024] Furthermore, the stratification of the patients with multiple sclerosis in new or established subgroups of multiple sclerosis is also covered, as well as the expedient selection of patient groups for the clinical development of new therapeutic agents. The term therapy control likewise covers the allocation of patients to responders and non-responders regarding a therapy or the therapy course thereof.

[0025] “Diagnosis” for the purposes of this invention means the positive determination of multiple sclerosis by means of the marker sequences according to the invention as well as the assignment of the patients to multiple sclerosis. The term diagnosis covers medical diagnostics and examinations in this regard, in particular in-vitro diagnostics and laboratory diagnostics, likewise proteomics and nucleic acid blotting. Further tests can be necessary to be sure and to exclude other diseases. The term diagnosis therefore likewise covers the differential diagnosis of multiple sclerosis by means of the marker sequences according to the invention and the prognosis of multiple sclerosis.

[0026] “Stratification or therapy control” for the purposes of this invention means that the method according to the invention renders possible decisions for the treatment and therapy of the patient, whether it is the hospitalization of the patient, the use, effect and/or dosage of one or more drugs, a therapeutic measure or the monitoring of a course of the disease and the course of therapy or etiology or classification of a disease, e.g., into a new or existing subtype or the differentiation of diseases and the patients thereof.

[0027] In a further embodiment of the invention, the term “stratification” covers in particular the risk stratification with the prognosis of an outcome of a negative health event.

[0028] Within the scope of this invention, “patient” means any test subject—human or mammal—with the proviso that the test subject is tested for multiple sclerosis.

[0029] The term “marker sequences” for the purposes of this invention means that the cDNA or the polypeptide or protein that can be respectively obtained therefrom are significant for multiple sclerosis. For example, the cDNA or the polypeptide or protein that can be respectively obtained therefrom can exhibit an interaction with substances from the body fluid or tissue extract of a patient with multiple sclerosis (e.g., antigen (epitope)/antibody (paratope) interaction). For the purposes of the invention “wherein at least one marker sequence of a cDNA selected from the group SEQ 1-395 or respectively a protein coding therefor or respectively a partial sequence or fragment thereof is determined on a patient to be examined” means that an interaction between the body fluid or tissue extract of a patient and the marker sequences according to the invention is detected. An interaction of this type is, e.g., a bond, in particular a binding substance on at least one marker sequence according to the invention or in the case of a cDNA the hybridization with a suitable substance under selected conditions, in particular stringent conditions (e.g., such as usually defined in J. Sambrook, E. F. Fritsch, T. Maniatis (1989), Molecular cloning: A laboratory manual, 2nd Edition, Cold Spring Harbor Laboratory Press, Cold Spring Harbor, USA or Ausubel, “Current Protocols in Molecular Biology,” Green Publishing Associates and Wiley Interscience, N.Y. (1989)). One example of stringent hybridization conditions is: hybridization in 4×SSC at 65° C. (alternatively in 50% formamide and 4×SSC at 42° C.), followed by several washing steps in 0.1×SSC at 65° C. for a total of approximately one hour. An example of less stringent hybridization conditions is hybridization in 4×SSC at 37° C., followed by several washing steps in 1×SSC at room temperature.

[0030] According to the invention, substances of this type are constituents of a body fluid, in particular blood, whole blood, blood plasma, blood serum, patient serum, urine, cerebrospinal fluid, synovial fluid or of a tissue extract of the patient.

[0031] In a further embodiment of the invention, however, the marker sequences according to the invention can be present in a significantly higher or lower expression rate or concentration that indicates multiple sclerosis. The relative sick/healthy expression rates of the marker sequences for multiple sclerosis according to the invention are hereby determined by means of proteomics or nucleic acid blotting.

[0032] In a further embodiment of the invention, the marker sequences have a recognition signal that is addressed to the substance to be bound (e.g., antibody, nucleic acid). It is preferred according to the invention for a protein the recognition signal is an epitope and/or a paratope and/or a hapten and for a cDNA is a hybridization or binding region.

[0033] The marker sequences according to the invention are the subject matter of Table A and can be clearly identified by the respectively cited database entry (also by means of the Internet: http://www.ncbi.nlm.nih.gov/) (see in Table A: accession no. there).

[0034] According to the invention, the marker sequences also cover those modifications of the cDNA sequence and the corresponding amino acid sequence as chemical modification, such as citrullination, acetylation, phosphorylation, glycosylation or poly(A) strand and other modifications known to one skilled in the art.

[0035] In a further embodiment of the invention, partial sequences or fragments of the marker sequences according to the invention are likewise covered. In particular those partial sequences that have an identity of 95%, 90%, in particular 80% or 70% with the marker sequences according to the invention.

[0036] In a further embodiment, the respective marker sequence can be represented in different quantities in one more regions on a solid support. This permits a variation of the sensitivity. The regions can have respectively a totality of marker sequences, i.e., a sufficient number of different marker sequences, in particular 2 to 5 or 10 or more and optionally more nucleic acids and/or proteins, in particular biomarkers. However, at least 96 to 25,000 (numerical) or more from different or identical marker sequences and further nucleic acids and/or proteins, in particular biomarkers are preferred. Furthermore preferred are more than 2,5000, in particular preferred 10,000 or more different or identical marker sequences and optionally further nucleic acids and/or proteins, in particular biomarkers.

[0037] Another object of the invention relates to an arrangement of marker sequences containing at least one marker sequence of a cDNA selected from the group SEQ 1-395 or respectively a protein coding therefor. Preferably, the arrangement contains at least 2 to 5 or 10, preferably 30 to 50 marker sequences or 50 to 100 or more marker sequences.

[0038] Within the scope of this invention, “arrangement” is synonymous with “array,” and if this “array” is used to identify substances on marker sequences, this is to be understood to be an “assay” or diagnostic device. In a preferred embodiment, the arrangement is designed such that the marker sequences represented on the arrangement are present in the form of a grid on a solid support. Furthermore, those arrangements are preferred that permit a high-density arrangement of protein binders and the marker sequences are spotted. Such high-density spotted arrangements are disclosed, for example, in WO 99/57311 and WO 99/57312 and can be used advantageously in a robot-supported automated high-throughput method.

[0039] Within the scope of this invention, however, the term “assay” or diagnostic device likewise comprises those embodiments of a device, such as ELISA (e.g., individual wells of a microtiter plate are coated with the marker sequences or combinations of marker sequences according to the invention, optionally applied in a robot-supported manner in the individual wells of the microtiter plate; examples are diagnostic ELISA kits by Phadia or “Searchlight” multiplex ELISA kits by Pierce/Thermo Fisher Scientific), bead-based assay (spectrally distinguishable bead populations are coated with marker sequences/combinations of marker sequences. The patient sample is incubated with this bead population and bound (auto) antibodies are detected by means of a further fluorescence-labeled secondary antibody/detection reagent via measurement of the fluorescence; i.e., Borrelia IgG kit or Athena Multilyte by Multimetrix), line assay (marker sequences according to the invention or combinations of marker sequences are immobilized on membranes in a robot-supported manner, which are examined/incubated with the patient sample; example “Euroline” by Euroimmun AG), Western Blot (example “Euroline-WB” by Euroimmun AG), immunochromatographic methods (e.g., lateral flow immunoassays; marker sequences/combinations of marker sequences are immobilized on test strips (membranes, U.S. Pat. No. 5,714,389 and the like); example “One Step HBsAg” test device by Acon Laboratories) or similar immunological single or multiplex detection measures.

[0040] The marker sequences of the arrangement are fixed on a solid support, but preferably spotted or immobilized even printed on, i.e. applied in a reproducible manner. One or more marker sequences can be present multiple times in the totality of all marker sequences and present in different quantities based on one spot. Furthermore, the marker sequences can be standardized on the solid support (i.e., by means of serial dilution series of, e.g., human globulins as internal calibrators for data normalization and quantitative evaluation).

[0041] The invention therefore relates to an assay or a protein biochip comprising an arrangement containing marker sequences according to the invention.

[0042] In a further embodiment, the marker sequences are present as clones. Clones of this type can be obtained, for example, by means of a cDNA expression library according to the invention (Büssow et al. 1998 (supra)). In a preferred embodiment, such expression libraries containing clones are obtained using expression vectors from a cDNA expression library comprising the cDNA marker sequences. These expression vectors preferably contain inducible promoters. The induction of the expression can be carried out, e.g., by means of an inductor, such as IPTG. Suitable expression vectors are described in Terpe et al. (Terpe T Appl Microbiol Biotechnol. 2003 January; 60(5): 523-33).

[0043] One skilled in the art is familiar with expression libraries, they can be produced according to standard works, such as Sambrook et al, “Molecular Cloning, A laboratory handbook, 2nd edition (1989), CSH press, Cold Spring Harbor, N.Y. Expression libraries are also preferred which are tissue-specific (e.g., human tissue, in particular human organs). Furthermore included according to the invention are expression libraries that can be obtained by exon-trapping. A synonym for expression library is expression bank.

[0044] Also preferred are protein biochips or corresponding expression libraries that do not exhibit any redundancy (so-called: Uniclone® library) and that may be produced, for example, according to the teachings of WO 99/57311 and WO 99/57312. These preferred Uniclone libraries have a high portion of non-defective fully expressed proteins of a cDNA expression library.

[0045] Within the context of this invention, the clones can also be, but not limited to, transformed bacteria, recombinant phages or transformed cells from mammals, insects, fungi, yeasts or plants.

[0046] The clones are fixed, spotted or immobilized on a solid support.

[0047] The invention therefore relates to an arrangement wherein the marker sequences are present as clones.

[0048] Additionally, the marker sequences can be present in the respective form of a fusion protein, which contains, for example, at least one affinity epitope or tag. The tag may be one such as contains c-myc, his tag, arg tag, FLAG, alkaline phosphatase, VS tag, T7 tag or strep tag, HAT tag, NusA, S tag, SBP tag, thioredoxin, DsbA, a fusion protein, preferably a cellulose-binding domain, green fluorescent protein, maltose-binding protein, calmodulin-binding protein, glutathione S-transferase or lacZ.

[0049] A marker sequence can also be composed of several individual marker sequences. This can comprise the cloning of individual fragments to form a large common fragment and the expression of this combined fragment.

[0050] In all of the embodiments, the term “solid support” covers embodiments such as a filter, a membrane, a magnetic or fluorophore-labeled bead, a silica wafer, glass, metal, ceramics, plastics, a chip, a target for mass spectrometry or a matrix. However, a filter is preferred according to the invention.

[0051] As a filter, furthermore PVDF, nitrocellulose or nylon is preferred (e.g., Immobilon P Millipore, Protran Whatman, Hybond N+ Amersham).

[0052] In another preferred embodiment of the arrangement according to the invention, the arrangement corresponds to a grid with the dimensions of a microtiter plate (8-12 wells strips, 96 wells, 384 wells or more), a silica wafer, a chip, a target for mass spectrometry, or a matrix.

[0053] In a further embodiment, the invention relates to an assay or a protein biochip for identifying and characterizing a substance for multiple sclerosis, characterized in that an arrangement or assay according to the invention is a.) brought into contact with at least one substance to be tested and b.) a binding success is detected.

[0054] Furthermore, the invention relates to a method for identifying and characterizing a substance for multiple sclerosis, characterized in that an arrangement or assay according to the invention is a.) brought into contact with at least one substance to be tested and b.) a binding success is detected.

[0055] The substance to be tested can be any native or non-native biomolecule, a synthetic chemical molecule, a mixture or a substance library.

[0056] After the substance to be tested contacts a marker sequence, the binding success is evaluated, which, for example, is carried out using commercially available image analyzing software (GenePix Pro (Axon Laboratories), Aida (Ray test), ScanArray (Packard Bioscience).

[0057] The visualization of protein-protein interactions according to the invention (e.g., protein on marker sequence, as antigen/antibody) or corresponding “means for detecting the binding success” can be performed, for example, using fluorescence labeling, biotinylation, radioisotope labeling or colloid gold or latex particle labeling in the usual way. A detection of bound antibodies is carried out with the aid of secondary antibodies, which are labeled with commercially available reporter molecules (e.g., Cy, Alexa, Dyomics, FITC or similar fluorescent dyes, colloidal gold or latex particles), or with reporter enzymes, such as alkaline phosphatase, horseradish peroxidase, etc., and the corresponding colorimetric, fluorescent or chemiluminescent substrates. Readout is conducted, e.g., using a microarray laser scanner, a CCD camera or visually.

[0058] In a further embodiment, the invention relates to a drug/active substance or prodrug developed for multiple sclerosis and obtainable through the use of the assay or protein biochip according to the invention.

[0059] The invention therefore likewise relates to the use of an arrangement according to the invention or an assay for screening active substances for multiple sclerosis.

[0060] In a further embodiment, the invention therefore likewise relates to a target for the treatment and therapy of multiple sclerosis respectively selected from the group SEQ 1-395 or a protein respectively coding therefor.

[0061] In a further embodiment, the invention likewise relates to the use of the marker sequences according to the invention, preferably in the form of an arrangement, as an affinity material for carrying out an apheresis or in the broadest sense a blood lavage, wherein substances from body fluids of a patient with multiple sclerosis, such as blood or plasma, bind to the marker sequences according to the invention and consequently can be selectively withdrawn from the body fluid.

### EXAMPLES AND FIGURES

[0062] Ten or more patient samples were individually screened against a cDNA expression library. The multiple sclerosis-specific expression clones were determined through a comparison with ten or more healthy samples. The identity of the marker sequences was determined by DNA sequencing.

[0063] FIG. 1 shows the differential screening between two protein biochips from respectively one cDNA expression bank of a patient and a healthy test subject. The differential clones are detected by means of fluorescent labeling and evaluated by means of bioinformatics. Table A:

[symbol]

The application's sequence listing, which the Patent Office published only in electronic form, follows.

SEQUENCE LISTING (395 sequences)

SEQ ID NO: 1 - DNA, 256 bp, Homo Sapiens
  misc_feature (2)..(2): n is a, c, g, or t
tnagaggagaattaactatgagaggatcgcatcaccatcaccatcacggatcctatttaggtgacactatagaatcgtcgacccacgcgtccgactgggacgacatggagaagatctggcaccacaccttctacaacgagctgcgcgtggccccggaggagcacccagtgctgctgaccgaggcccccctgaaccccaaggccaacagagagaagatgactcagattatgtttgagaccttcaacaccccggccat

SEQ ID NO: 2 - DNA, 1635 bp, Homo Sapiens
  misc_feature (7)..(10): n is a, c, g, or t
  misc_feature (13)..(13): n is a, c, g, or t
  misc_feature (17)..(17): n is a, c, g, or t
  misc_feature (26)..(26): n is a, c, g, or t
  misc_feature (29)..(29): n is a, c, g, or t
  misc_feature (38)..(39): n is a, c, g, or t
  misc_feature (46)..(46): n is a, c, g, or t
  misc_feature (57)..(57): n is a, c, g, or t
  misc_feature (63)..(63): n is a, c, g, or t
  misc_feature (69)..(69): n is a, c, g, or t
  misc_feature (76)..(76): n is a, c, g, or t
  misc_feature (84)..(84): n is a, c, g, or t
  misc_feature (102)..(102): n is a, c, g, or t
  misc_feature (120)..(120): n is a, c, g, or t
  misc_feature (127)..(127): n is a, c, g, or t
  misc_feature (135)..(135): n is a, c, g, or t
  misc_feature (140)..(140): n is a, c, g, or t
  misc_feature (142)..(142): n is a, c, g, or t
  misc_feature (148)..(148): n is a, c, g, or t
  misc_feature (150)..(150): n is a, c, g, or t
  misc_feature (161)..(161): n is a, c, g, or t
  misc_feature (164)..(164): n is a, c, g, or t
  misc_feature (177)..(177): n is a, c, g, or t
  misc_feature (179)..(179): n is a, c, g, or t
  misc_feature (187)..(188): n is a, c, g, or t
  misc_feature (190)..(190): n is a, c, g, or t
  misc_feature (199)..(199): n is a, c, g, or t
  misc_feature (204)..(204): n is a, c, g, or t
  misc_feature (206)..(207): n is a, c, g, or t
  misc_feature (209)..(209): n is a, c, g, or t
  misc_feature (216)..(217): n is a, c, g, or t
  misc_feature (220)..(222): n is a, c, g, or t
  misc_feature (247)..(247): n is a, c, g, or t
  misc_feature (251)..(251): n is a, c, g, or t
  misc_feature (253)..(253): n is a, c, g, or t
  misc_feature (270)..(270): n is a, c, g, or t
  misc_feature (274)..(274): n is a, c, g, or t
  misc_feature (277)..(277): n is a, c, g, or t
  misc_feature (279)..(281): n is a, c, g, or t
  misc_feature (285)..(285): n is a, c, g, or t
  misc_feature (293)..(294): n is a, c, g, or t
  misc_feature (304)..(304): n is a, c, g, or t
  misc_feature (306)..(306): n is a, c, g, or t
  misc_feature (310)..(310): n is a, c, g, or t
  misc_feature (313)..(313): n is a, c, g, or t
  misc_feature (331)..(331): n is a, c, g, or t
  misc_feature (334)..(334): n is a, c, g, or t
  misc_feature (336)..(336): n is a, c, g, or t
  misc_feature (353)..(353): n is a, c, g, or t
  misc_feature (356)..(356): n is a, c, g, or t
  misc_feature (359)..(359): n is a, c, g, or t
  misc_feature (372)..(373): n is a, c, g, or t
  misc_feature (380)..(380): n is a, c, g, or t
  misc_feature (382)..(382): n is a, c, g, or t
  misc_feature (384)..(384): n is a, c, g, or t
  misc_feature (387)..(387): n is a, c, g, or t
  misc_feature (394)..(394): n is a, c, g, or t
  misc_feature (408)..(409): n is a, c, g, or t
  misc_feature (411)..(411): n is a, c, g, or t
  misc_feature (414)..(414): n is a, c, g, or t
  misc_feature (418)..(418): n is a, c, g, or t
  misc_feature (425)..(426): n is a, c, g, or t
  misc_feature (430)..(430): n is a, c, g, or t
  misc_feature (442)..(442): n is a, c, g, or t
  misc_feature (456)..(456): n is a, c, g, or t
  misc_feature (458)..(458): n is a, c, g, or t
  misc_feature (461)..(461): n is a, c, g, or t
  misc_feature (469)..(470): n is a, c, g, or t
  misc_feature (472)..(473): n is a, c, g, or t
  misc_feature (475)..(476): n is a, c, g, or t
  misc_feature (480)..(481): n is a, c, g, or t
  misc_feature (484)..(484): n is a, c, g, or t
  misc_feature (502)..(502): n is a, c, g, or t
  misc_feature (507)..(508): n is a, c, g, or t
  misc_feature (510)..(511): n is a, c, g, or t
  misc_feature (520)..(520): n is a, c, g, or t
  misc_feature (522)..(522): n is a, c, g, or t
  misc_feature (525)..(525): n is a, c, g, or t
  misc_feature (529)..(529): n is a, c, g, or t
  misc_feature (540)..(540): n is a, c, g, or t
  misc_feature (550)..(550): n is a, c, g, or t
  misc_feature (553)..(553): n is a, c, g, or t
  misc_feature (563)..(563): n is a, c, g, or t
  misc_feature (572)..(572): n is a, c, g, or t
  misc_feature (578)..(580): n is a, c, g, or t
  misc_feature (582)..(582): n is a, c, g, or t
  misc_feature (588)..(590): n is a, c, g, or t
  misc_feature (594)..(598): n is a, c, g, or t
  misc_feature (600)..(600): n is a, c, g, or t
  misc_feature (602)..(602): n is a, c, g, or t
  misc_feature (608)..(608): n is a, c, g, or t
  misc_feature (610)..(610): n is a, c, g, or t
  misc_feature (612)..(612): n is a, c, g, or t
  misc_feature (615)..(615): n is a, c, g, or t
  misc_feature (617)..(617): n is a, c, g, or t
  misc_feature (619)..(619): n is a, c, g, or t
  misc_feature (628)..(628): n is a, c, g, or t
  misc_feature (641)..(641): n is a, c, g, or t
  misc_feature (655)..(655): n is a, c, g, or t
  misc_feature (658)..(658): n is a, c, g, or t
  misc_feature (660)..(661): n is a, c, g, or t
  misc_feature (669)..(669): n is a, c, g, or t
  misc_feature (674)..(674): n is a, c, g, or t
  misc_feature (677)..(678): n is a, c, g, or t
  misc_feature (681)..(681): n is a, c, g, or t
  misc_feature (685)..(686): n is a, c, g, or t
  misc_feature (699)..(699): n is a, c, g, or t
  misc_feature (702)..(703): n is a, c, g, or t
  misc_feature (705)..(705): n is a, c, g, or t
  misc_feature (709)..(709): n is a, c, g, or t
  misc_feature (727)..(727): n is a, c, g, or t
  misc_feature (730)..(730): n is a, c, g, or t
  misc_feature (742)..(744): n is a, c, g, or t
  misc_feature (748)..(748): n is a, c, g, or t
  misc_feature (763)..(763): n is a, c, g, or t
  misc_feature (770)..(770): n is a, c, g, or t
  misc_feature (772)..(772): n is a, c, g, or t
  misc_feature (776)..(776): n is a, c, g, or t
  misc_feature (780)..(781): n is a, c, g, or t
  misc_feature (783)..(784): n is a, c, g, or t
  misc_feature (787)..(787): n is a, c, g, or t
  misc_feature (789)..(789): n is a, c, g, or t
  misc_feature (794)..(794): n is a, c, g, or t
  misc_feature (799)..(799): n is a, c, g, or t
  misc_feature (804)..(804): n is a, c, g, or t
  misc_feature (811)..(812): n is a, c, g, or t
  misc_feature (816)..(817): n is a, c, g, or t
  misc_feature (822)..(822): n is a, c, g, or t
  misc_feature (826)..(826): n is a, c, g, or t
  misc_feature (832)..(832): n is a, c, g, or t
  misc_feature (839)..(839): n is a, c, g, or t
  misc_feature (853)..(853): n is a, c, g, or t
  misc_feature (863)..(863): n is a, c, g, or t
  misc_feature (874)..(875): n is a, c, g, or t
  misc_feature (878)..(878): n is a, c, g, or t
  misc_feature (887)..(887): n is a, c, g, or t
  misc_feature (892)..(892): n is a, c, g, or t
  misc_feature (901)..(901): n is a, c, g, or t
  misc_feature (909)..(910): n is a, c, g, or t
  misc_feature (912)..(912): n is a, c, g, or t
  misc_feature (917)..(918): n is a, c, g, or t
  misc_feature (923)..(923): n is a, c, g, or t
  misc_feature (926)..(926): n is a, c, g, or t
  misc_feature (934)..(934): n is a, c, g, or t
  misc_feature (937)..(937): n is a, c, g, or t
  misc_feature (939)..(939): n is a, c, g, or t
  misc_feature (944)..(944): n is a, c, g, or t
  misc_feature (946)..(947): n is a, c, g, or t
  misc_feature (952)..(952): n is a, c, g, or t
  misc_feature (962)..(963): n is a, c, g, or t
  misc_feature (967)..(968): n is a, c, g, or t
  misc_feature (983)..(983): n is a, c, g, or t
  misc_feature (986)..(986): n is a, c, g, or t
  misc_feature (990)..(993): n is a, c, g, or t
  misc_feature (1001)..(1002): n is a, c, g, or t
  misc_feature (1007)..(1008): n is a, c, g, or t
  misc_feature (1014)..(1014): n is a, c, g, or t
  misc_feature (1021)..(1021): n is a, c, g, or t
  misc_feature (1027)..(1027): n is a, c, g, or t
  misc_feature (1029)..(1029): n is a, c, g, or t
  misc_feature (1033)..(1033): n is a, c, g, or t
  misc_feature (1039)..(1039): n is a, c, g, or t
  misc_feature (1041)..(1041): n is a, c, g, or t
  misc_feature (1044)..(1044): n is a, c, g, or t
  misc_feature (1051)..(1052): n is a, c, g, or t
  misc_feature (1063)..(1063): n is a, c, g, or t
  misc_feature (1065)..(1065): n is a, c, g, or t
  misc_feature (1069)..(1069): n is a, c, g, or t
  misc_feature (1074)..(1074): n is a, c, g, or t
  misc_feature (1076)..(1078): n is a, c, g, or t
  misc_feature (1082)..(1082): n is a, c, g, or t
  misc_feature (1088)..(1089): n is a, c, g, or t
  misc_feature (1096)..(1096): n is a, c, g, or t
  misc_feature (1101)..(1101): n is a, c, g, or t
  misc_feature (1103)..(1103): n is a, c, g, or t
  misc_feature (1106)..(1106): n is a, c, g, or t
  misc_feature (1115)..(1116): n is a, c, g, or t
  misc_feature (1118)..(1119): n is a, c, g, or t
  misc_feature (1122)..(1124): n is a, c, g, or t
  misc_feature (1131)..(1132): n is a, c, g, or t
  misc_feature (1139)..(1139): n is a, c, g, or t
  misc_feature (1142)..(1143): n is a, c, g, or t
  misc_feature (1149)..(1149): n is a, c, g, or t
  misc_feature (1155)..(1155): n is a, c, g, or t
  misc_feature (1157)..(1157): n is a, c, g, or t
  misc_feature (1163)..(1163): n is a, c, g, or t
  misc_feature (1175)..(1176): n is a, c, g, or t
  misc_feature (1182)..(1182): n is a, c, g, or t
  misc_feature (1192)..(1193): n is a, c, g, or t
  misc_feature (1195)..(1196): n is a, c, g, or t
  misc_feature (1198)..(1198): n is a, c, g, or t
  misc_feature (1206)..(1206): n is a, c, g, or t
  misc_feature (1210)..(1210): n is a, c, g, or t
  misc_feature (1212)..(1212): n is a, c, g, or t
  misc_feature (1215)..(1215): n is a, c, g, or t
  misc_feature (1219)..(1219): n is a, c, g, or t
  misc_feature (1225)..(1225): n is a, c, g, or t
  misc_feature (1227)..(1227): n is a, c, g, or t
  misc_feature (1231)..(1233): n is a, c, g, or t
  misc_feature (1240)..(1240): n is a, c, g, or t
  misc_feature (1243)..(1243): n is a, c, g, or t
  misc_feature (1245)..(1246): n is a, c, g, or t
  misc_feature (1248)..(1249): n is a, c, g, or t
  misc_feature (1257)..(1257): n is a, c, g, or t
  misc_feature (1262)..(1262): n is a, c, g, or t
  misc_feature (1267)..(1267): n is a, c, g, or t
  misc_feature (1276)..(1276): n is a, c, g, or t
  misc_feature (1279)..(1281): n is a, c, g, or t
  misc_feature (1285)..(1285): n is a, c, g, or t
  misc_feature (1287)..(1287): n is a, c, g, or t
  misc_feature (1289)..(1291): n is a, c, g, or t
  misc_feature (1293)..(1294): n is a, c, g, or t
  misc_feature (1297)..(1299): n is a, c, g, or t
  misc_feature (1304)..(1304): n is a, c, g, or t
  misc_feature (1310)..(1311): n is a, c, g, or t
  misc_feature (1313)..(1313): n is a, c, g, or t
  misc_feature (1318)..(1318): n is a, c, g, or t
  misc_feature (1320)..(1320): n is a, c, g, or t
  misc_feature (1325)..(1325): n is a, c, g, or t
  misc_feature (1329)..(1329): n is a, c, g, or t
  misc_feature (1336)..(1336): n is a, c, g, or t
  misc_feature (1338)..(1338): n is a, c, g, or t
  misc_feature (1341)..(1344): n is a, c, g, or t
  misc_feature (1348)..(1349): n is a, c, g, or t
  misc_feature (1351)..(1352): n is a, c, g, or t
  misc_feature (1355)..(1356): n is a, c, g, or t
  misc_feature (1364)..(1365): n is a, c, g, or t
  misc_feature (1370)..(1370): n is a, c, g, or t
  misc_feature (1374)..(1374): n is a, c, g, or t
  misc_feature (1380)..(1380): n is a, c, g, or t
  misc_feature (1383)..(1384): n is a, c, g, or t
  misc_feature (1386)..(1388): n is a, c, g, or t
  misc_feature (1398)..(1399): n is a, c, g, or t
  misc_feature (1401)..(1402): n is a, c, g, or t
  misc_feature (1404)..(1404): n is a, c, g, or t
  misc_feature (1407)..(1407): n is a, c, g, or t
  misc_feature (1413)..(1413): n is a, c, g, or t
  misc_feature (1426)..(1426): n is a, c, g, or t
  misc_feature (1436)..(1437): n is a, c, g, or t
  misc_feature (1440)..(1440): n is a, c, g, or t
  misc_feature (1447)..(1447): n is a, c, g, or t
  misc_feature (1454)..(1454): n is a, c, g, or t
  misc_feature (1462)..(1462): n is a, c, g, or t
  misc_feature (1489)..(1489): n is a, c, g, or t
  misc_feature (1493)..(1493): n is a, c, g, or t
  misc_feature (1495)..(1495): n is a, c, g, or t
  misc_feature (1504)..(1504): n is a, c, g, or t
  misc_feature (1506)..(1506): n is a, c, g, or t
  misc_feature (1508)..(1509): n is a, c, g, or t
  misc_feature (1514)..(1514): n is a, c, g, or t
  misc_feature (1517)..(1518): n is a, c, g, or t
  misc_feature (1528)..(1528): n is a, c, g, or t
  misc_feature (1531)..(1532): n is a, c, g, or t
  misc_feature (1537)..(1538): n is a, c, g, or t
  misc_feature (1548)..(1548): n is a, c, g, or t
  misc_feature (1554)..(1554): n is a, c, g, or t
  misc_feature (1559)..(1560): n is a, c, g, or t
  misc_feature (1562)..(1562): n is a, c, g, or t
  misc_feature (1566)..(1568): n is a, c, g, or t
  misc_feature (1571)..(1572): n is a, c, g, or t
  misc_feature (1574)..(1574): n is a, c, g, or t
  misc_feature (1576)..(1576): n is a, c, g, or t
  misc_feature (1579)..(1579): n is a, c, g, or t
  misc_feature (1585)..(1585): n is a, c, g, or t
  misc_feature (1590)..(1590): n is a, c, g, or t
  misc_feature (1596)..(1596): n is a, c, g, or t
  misc_feature (1608)..(1608): n is a, c, g, or t
  misc_feature (1612)..(1612): n is a, c, g, or t
  misc_feature (1622)..(1622): n is a, c, g, or t
  misc_feature (1631)..(1635): n is a, c, g, or t
gaaaaannnnggnaaantttctgtgnggngggggtctnncttctcncctctcccctntcgggnatctcnatttttnaggggtgnacatataataaaatctcnctcacaccacagcggctntccggcnataggtcnaaggngnggcacntngctgttacgcnacncgaggggcggagnangtttcccnncncggcccctngcccncnngnctgtgcnnatnnnatgtatgccgaccctactgacgagnatangnctaaaacgcagataaangacnagnannngttncaatgccnngaactgctcnantgcnggntgcaggtgggggcccccnagnangaggacgaagaggagcnagnacncggtcctgttggnntaggccnangncgnggctgcntgctggatgctctnntnccncggnctctctnnttgnccaagctttccncgacctccgctccnanganttccacannanncnnaacnnctnagatgctattagtcatgnactanncnntcttactgntntgnctcnttgacgaactntattcatatnttnaggttttttnactaaaaanttgcannntnaaacannncttnnnnntntnagtttnanantgntntnttactttantccctttggaatnatccctgcatgaanttnanngttcaagntgtcnaanngantganngacaatatctttnatnnantatngtacgatacattttaaantcnaaaattcctggnnntatnatctcgtgttgttantgtaaanantggnaacnntnnttnanagtcntcaanctaanttctttnnaaanncatanttanggatgnattcaanatttcttcggtaangacctttttnagaaattcttnnttngcattattnataanctccttcanaaaaggannanttttnnaaatnccntcttttcnaantnctttnannatccnacctctttgnnctgnnaaaaaattaaagaanttnatannnnaaattatnntaacnnaatttnaataaancaattngncctntttttntnatnaaaaggnncagtgttcatntntgtnagttncnnnttgnttaaanngacatanaattntnaancttttctcnncnnaannnccataanngttcctntcnntaaaantggaancnctaaantattttttgtanncactanataatttttnntnnanaaagaatntttntnacngttngtcttnantccnnntatgcgnttncnntnnatttatanaggtncaccnaacaattcnttnnntaantnannntnncannnggtancctctnnanccagncntattntttnaaataanangtnnnnttgnncnnctnnccagctcnnttatntatntttagnttnntnnnatctcttgannannanatnaccttnttctaaatatcanctgtaatctnnccncaaatangatctantctattanaatataccttgtggtattgtaaaaaanaaantntttatatcngntnncatanttnngtaacatatnatnnacttnnataatatttnatttcntattnncnaaannnttnncntntantataancacanaatcgntacatattacanttcnatatataacnactactatnnnnn

SEQ ID NO: 3 - DNA, 1392 bp, Homo Sapiens
  misc_feature (826)..(826): n is a, c, g, or t
  misc_feature (852)..(852): n is a, c, g, or t
  misc_feature (854)..(854): n is a, c, g, or t
  misc_feature (877)..(877): n is a, c, g, or t
  misc_feature (880)..(880): n is a, c, g, or t
  misc_feature (901)..(901): n is a, c, g, or t
  misc_feature (948)..(948): n is a, c, g, or t
  misc_feature (974)..(974): n is a, c, g, or t
  misc_feature (986)..(986): n is a, c, g, or t
  misc_feature (997)..(997): n is a, c, g, or t
  misc_feature (1007)..(1007): n is a, c, g, or t
  misc_feature (1011)..(1011): n is a, c, g, or t
  misc_feature (1013)..(1013): n is a, c, g, or t
  misc_feature (1020)..(1020): n is a, c, g, or t
  misc_feature (1023)..(1023): n is a, c, g, or t
  misc_feature (1031)..(1031): n is a, c, g, or t
  misc_feature (1054)..(1054): n is a, c, g, or t
  misc_feature (1056)..(1056): n is a, c, g, or t
  misc_feature (1062)..(1062): n is a, c, g, or t
  misc_feature (1064)..(1065): n is a, c, g, or t
  misc_feature (1080)..(1081): n is a, c, g, or t
  misc_feature (1089)..(1089): n is a, c, g, or t
  misc_feature (1093)..(1093): n is a, c, g, or t
  misc_feature (1098)..(1099): n is a, c, g, or t
  misc_feature (1112)..(1113): n is a, c, g, or t
  misc_feature (1129)..(1129): n is a, c, g, or t
  misc_feature (1137)..(1137): n is a, c, g, or t
  misc_feature (1139)..(1139): n is a, c, g, or t
  misc_feature (1147)..(1147): n is a, c, g, or t
  misc_feature (1151)..(1151): n is a, c, g, or t
  misc_feature (1154)..(1154): n is a, c, g, or t
  misc_feature (1156)..(1156): n is a, c, g, or t
  misc_feature (1165)..(1165): n is a, c, g, or t
  misc_feature (1171)..(1171): n is a, c, g, or t
  misc_feature (1190)..(1190): n is a, c, g, or t
  misc_feature (1199)..(1199): n is a, c, g, or t
  misc_feature (1204)..(1205): n is a, c, g, or t
  misc_feature (1212)..(1213): n is a, c, g, or t
  misc_feature (1222)..(1222): n is a, c, g, or t
  misc_feature (1240)..(1241): n is a, c, g, or t
  misc_feature (1248)..(1248): n is a, c, g, or t
  misc_feature (1256)..(1256): n is a, c, g, or t
  misc_feature (1259)..(1259): n is a, c, g, or t
  misc_feature (1272)..(1273): n is a, c, g, or t
  misc_feature (1280)..(1280): n is a, c, g, or t
  misc_feature (1282)..(1283): n is a, c, g, or t
  misc_feature (1289)..(1291): n is a, c, g, or t
  misc_feature (1294)..(1295): n is a, c, g, or t
  misc_feature (1297)..(1300): n is a, c, g, or t
  misc_feature (1304)..(1316): n is a, c, g, or t
  misc_feature (1318)..(1322): n is a, c, g, or t
  misc_feature (1325)..(1325): n is a, c, g, or t
  misc_feature (1329)..(1331): n is a, c, g, or t
  misc_feature (1333)..(1337): n is a, c, g, or t
  misc_feature (1342)..(1342): n is a, c, g, or t
  misc_feature (1346)..(1348): n is a, c, g, or t
  misc_feature (1356)..(1358): n is a, c, g, or t
  misc_feature (1363)..(1364): n is a, c, g, or t
  misc_feature (1373)..(1373): n is a, c, g, or t
  misc_feature (1380)..(1381): n is a, c, g, or t
  misc_feature (1383)..(1383): n is a, c, g, or t
  misc_feature (1385)..(1386): n is a, c, g, or t
  misc_feature (1392)..(1392): n is a, c, g, or t
tagagaaattactatgagaggatcgcatcaccatcaccatcacggatcctatttaggtgacactatagaatcgtcgacccacgcgtccgcttcagcagcaagagcagcagctccagcaactccagcagctcctggcctccccgcagctgaccccggaacaccagactgttgtctaccagatgatccagcagatccagcagaaacgggagctgcagcgcctgcagatggctgggggctcccagctgcccatggccagcctgctggcaggaagctccaccccgctgctgtctgcgggtacccctggcctgctgcccacagcgtctgctccacccctgctgcccgctggagccctagtggctccctcgcttggcaacaacacaagtctcatggccgcagcagctgcagctgcagcagtagcagcagcaggcggacctccagtcctcactgcccagaccaaccccttcctcagcctgtcgggagcagagggcagtggcggtggccccaaaggagggaccgctgacaaaggagcctcagccaaccaggaaaaaggctaaatccacccttacccctcctgacccccccaagtggagggaacagatcctggcctgaggggtcctagcctggagcaggcgcctgcgcccagaccctggagagccttgacccagagcctgtgctgaggtccagggagtgtggagagctcctggtgtcgaggactgagactgagaggggagccccctccatctggcccccttccctttccgcactgtccgctttgtgaggctcagaggaaggacagtctgcaagcccgcctaggaggtccatcccnagcaaatgttttggaggtccccccananagcaaagtgggccatggcaaaantanggggttggttggacctgtcanatgaaaatggatcagcactttgaatgggaaaaattggaaggaaaagnccttggcctgtccctgcggggaaatnttttatggaaanaagggctggancccactttanctgnanttttttnccnacttgggnaaaatggaaaaaggaacccttgnantttttntnncatcccccccccagnnaaggggcnaaanttgannttttaaaaacccnnaaattttgggggctgnaaaagggnangaaaaaantaanttnancccagcctnttaaanttttgggccccttaaaggnaaaaaaggnaaggnngggaaanntttgccttntttgggcccccctttttnncaattgnaaataaangcnaaaggggaaaaannccccccnanntaaggnnngcnnannnngtgnnnnnnnnnnnnntnnnnnttncccnnnannnnnagggnaaannnttaaaaannnaaaannccctttttncccccanntntnngggggn

SEQ ID NO: 4 - DNA, 256 bp, Homo Sapiens
attactatgagaggatcgcatcaccatcaccatcacggatcctatttaggtgacactatagaatcgtcgacccacgcgtccgcagatagcgggccaggcgggttggaattgacaccacctgtggtctcactaaccccaaaactgcgctcgacccggctgcgtccagggtctctagtccccccactagagactgagaagttgcctcgcaaacgagcaggggccccagttggtgggagtcctgggctggcaaagcggg

SEQ ID NO: 5 - DNA, 1200 bp, Homo Sapiens
  misc_feature (135)..(135): n is a, c, g, or t
  misc_feature (139)..(139): n is a, c, g, or t
  misc_feature (167)..(167): n is a, c, g, or t
  misc_feature (200)..(200): n is a, c, g, or t
  misc_feature (280)..(280): n is a, c, g, or t
  misc_feature (379)..(379): n is a, c, g, or t
  misc_feature (424)..(424): n is a, c, g, or t
  misc_feature (640)..(640): n is a, c, g, or t
  misc_feature (671)..(671): n is a, c, g, or t
  misc_feature (731)..(731): n is a, c, g, or t
  misc_feature (751)..(751): n is a, c, g, or t
  misc_feature (753)..(753): n is a, c, g, or t
  misc_feature (837)..(837): n is a, c, g, or t
  misc_feature (839)..(839): n is a, c, g, or t
  misc_feature (849)..(849): n is a, c, g, or t
  misc_feature (853)..(853): n is a, c, g, or t
  misc_feature (855)..(855): n is a, c, g, or t
  misc_feature (865)..(865): n is a, c, g, or t
  misc_feature (875)..(876): n is a, c, g, or t
  misc_feature (884)..(885): n is a, c, g, or t
  misc_feature (889)..(889): n is a, c, g, or t
  misc_feature (901)..(901): n is a, c, g, or t
  misc_feature (913)..(913): n is a, c, g, or t
  misc_feature (918)..(918): n is a, c, g, or t
  misc_feature (933)..(933): n is a, c, g, or t
  misc_feature (955)..(955): n is a, c, g, or t
  misc_feature (966)..(966): n is a, c, g, or t
  misc_feature (970)..(970): n is a, c, g, or t
  misc_feature (981)..(981): n is a, c, g, or t
  misc_feature (985)..(985): n is a, c, g, or t
  misc_feature (1003)..(1004): n is a, c, g, or t
  misc_feature (1014)..(1014): n is a, c, g, or t
  misc_feature (1018)..(1018): n is a, c, g, or t
  misc_feature (1021)..(1021): n is a, c, g, or t
  misc_feature (1024)..(1024): n is a, c, g, or t
  misc_feature (1030)..(1032): n is a, c, g, or t
  misc_feature (1079)..(1081): n is a, c, g, or t
  misc_feature (1089)..(1089): n is a, c, g, or t
  misc_feature (1092)..(1092): n is a, c, g, or t
  misc_feature (1096)..(1097): n is a, c, g, or t
  misc_feature (1099)..(1099): n is a, c, g, or t
  misc_feature (1101)..(1101): n is a, c, g, or t
  misc_feature (1103)..(1104): n is a, c, g, or t
  misc_feature (1108)..(1108): n is a, c, g, or t
  misc_feature (1113)..(1118): n is a, c, g, or t
  misc_feature (1121)..(1124): n is a, c, g, or t
  misc_feature (1131)..(1131): n is a, c, g, or t
  misc_feature (1133)..(1133): n is a, c, g, or t
  misc_feature (1137)..(1137): n is a, c, g, or t
  misc_feature (1147)..(1147): n is a, c, g, or t
  misc_feature (1149)..(1149): n is a, c, g, or t
  misc_feature (1156)..(1156): n is a, c, g, or t
  misc_feature (1164)..(1164): n is a, c, g, or t
  misc_feature (1168)..(1168): n is a, c, g, or t
  misc_feature (1170)..(1170): n is a, c, g, or t
  misc_feature (1179)..(1179): n is a, c, g, or t
  misc_feature (1187)..(1187): n is a, c, g, or t
  misc_feature (1196)..(1197): n is a, c, g, or t
tagagaaattactatgagaggatcgcatcaccatcaccatcacgggatcctatttaggtgacactatagaatcgtcgacccacgcgtccggtcggggaaaccagcacgatgtgccagtcattcctttggatgtanctancataatcagacagagaagttggacaccnacataactgaggtggatgcagcctccgtttacncgctgcctgctggagctgacttcctcatgtgttactctgttgcagaaggatattattctcaccgggaaactgtgaacggntcatggtacattcaagatttgtgtgagatgttgggaaaatatggctcctccttaaagttcacagaactcctcacactggtgaacaggaaagtttctcancgccgagtggacttttgcaaagacccaagtgcaattggaaagaancaggttccctgttttgcctcaatgctaactaaaaagctgcatttctttccaaaatctaattaattaatagaggctatctaattttacactctgtattgaaaatggctttctcagccaggcgtggttactcacacctgtaatcccagcactttgggagtccaaggtgggcggatcacctgaggtcgggagttcgagaccagcctgaccaacatgganaagccccgtctctactaaaaatgcaaaaaanaatttagctaggcatggcggcgcatgcctgcaatcccagctacttggaaggctgaggcangagaatcacttgaacccagnangtggaggctgcggtgagccgagattgcgccattgcactccagcctgggcaacgagtgaaactccgtctcaaaaaaaaaaaatgncnttctcttccnttanantaaatatcgntagggtgaanncattatgnnctantgattcaaatgnttttaaagttantgccnaccaaaaaactgccnttaaaaaaaaaaaaaaaatttncctgttggccntggngaaaggggttngaantggaaaaaccaaaatccnncggaaatttnaaanaanaanaatttnnnaaccattttgtatttatttttttaaaaaaccggccgggggttccccnnnaaaaaaanagncccnncnananntttnaaaannnnnntannnngggggcngncccnccccaagggnancccaatnaacctttnttancngacctgganccccggtnaaaattccnnaag

SEQ ID NO: 6 - DNA, 1220 bp, Homo Sapiens
  misc_feature (882)..(882): n is a, c, g, or t
  misc_feature (947)..(947): n is a, c, g, or t
  misc_feature (962)..(962): n is a, c, g, or t
  misc_feature (969)..(969): n is a, c, g, or t
  misc_feature (977)..(977): n is a, c, g, or t
  misc_feature (981)..(981): n is a, c, g, or t
  misc_feature (1005)..(1005): n is a, c, g, or t
  misc_feature (1008)..(1008): n is a, c, g, or t
  misc_feature (1010)..(1010): n is a, c, g, or t
  misc_feature (1026)..(1026): n is a, c, g, or t
  misc_feature (1053)..(1053): n is a, c, g, or t
  misc_feature (1058)..(1058): n is a, c, g, or t
  misc_feature (1079)..(1079): n is a, c, g, or t
  misc_feature (1085)..(1085): n is a, c, g, or t
  misc_feature (1091)..(1091): n is a, c, g, or t
  misc_feature (1107)..(1107): n is a, c, g, or t
  misc_feature (1111)..(1111): n is a, c, g, or t
  misc_feature (1125)..(1125): n is a, c, g, or t
  misc_feature (1129)..(1129): n is a, c, g, or t
  misc_feature (1135)..(1135): n is a, c, g, or t
  misc_feature (1144)..(1144): n is a, c, g, or t
  misc_feature (1146)..(1147): n is a, c, g, or t
  misc_feature (1163)..(1163): n is a, c, g, or t
  misc_feature (1172)..(1172): n is a, c, g, or t
  misc_feature (1175)..(1175): n is a, c, g, or t
  misc_feature (1180)..(1180): n is a, c, g, or t
  misc_feature (1195)..(1195): n is a, c, g, or t
  misc_feature (1199)..(1200): n is a, c, g, or t
  misc_feature (1206)..(1206): n is a, c, g, or t
  misc_feature (1212)..(1212): n is a, c, g, or t
  misc_feature (1214)..(1214): n is a, c, g, or t
  misc_feature (1218)..(1219): n is a, c, g, or t
tagagaaattactatgagaggatcgcatcaccatcaccatcacggatcctatttaggtgacactatagaatcgtcgacccacgcgtccgggcagaaatgggatcagaaatcacagaaaccccgagactcttcagttgaagttcgtagtgattgggaagtgaaagaggaaatggattttcctcagttgatgaagatgcgctacttggaagtatcagagccacaggacattgagtgttgtggggccctagaatactacgacaaagcctttgaccgcatcaccacgaggagtgagaagccactgcggagcatcaagcgcatcttccacactgtcaccaccacagacgaccctgtcatccgcaagctggcaaaaactcaggggaatgtgtttgccactgatgccatcctggccacgctgatgagctgtacccgctcagtgtattcctgggatattgtcgtccagagagttgggtccaaactcttctttgacaagagagacaactctgactttgcgctgcgcacattgtcagtgactctttgttgcatggtgagtgaccatgccacgcttttgcagacctcctgacagtgagtgagactgccaatgagccccctcaagatgaaggtaattccttcaattcaccccgcaacctggccatggaggcaacctacatcaaccacaatttctcccagcagtgcttgagaatggggaaggaaagatacaacttccccaacccaaacccgtttgtggaggacgacatggataagaatgaaatcgcctctgttgcgtaccgttaccgcaggtggaagcttggagatgatattgaccttattgtccgttgtgagcacgatggcgtcatgactggagccaacggggaaagtgtcctncatcaacatcaagacactcaatgagtgggattccaggccactgtaatggcgttgactggcgtcanaagctggactctcancgagggnctgtcatngccncggagctgaagaacacagctacanttngnccgggggacctgctgngctttgctggctggatctgaatacctnagctnggttatggtcccggtacccgngaaaantcctcngcccgtctcctagggncccngcagttcaggctantganttgccncccaatcancnngagcgggaaaaggccngggcatttnccngcccnttactcgcctgaacngggnnggcaancctctncncagnnc

SEQ ID NO: 7 - DNA, 1340 bp, Homo Sapiens
  misc_feature (1)..(1): n is a, c, g, or t
  misc_feature (4)..(10): n is a, c, g, or t
  misc_feature (15)..(15): n is a, c, g, or t
  misc_feature (577)..(577): n is a, c, g, or t
  misc_feature (629)..(629): n is a, c, g, or t
  misc_feature (654)..(654): n is a, c, g, or t
  misc_feature (709)..(709): n is a, c, g, or t
  misc_feature (720)..(720): n is a, c, g, or t
  misc_feature (748)..(748): n is a, c, g, or t
  misc_feature (792)..(792): n is a, c, g, or t
  misc_feature (797)..(797): n is a, c, g, or t
  misc_feature (818)..(818): n is a, c, g, or t
  misc_feature (822)..(822): n is a, c, g, or t
  misc_feature (825)..(826): n is a, c, g, or t
  misc_feature (831)..(831): n is a, c, g, or t
  misc_feature (836)..(836): n is a, c, g, or t
  misc_feature (842)..(842): n is a, c, g, or t
  misc_feature (845)..(845): n is a, c, g, or t
  misc_feature (863)..(864): n is a, c, g, or t
  misc_feature (868)..(868): n is a, c, g, or t
  misc_feature (870)..(870): n is a, c, g, or t
  misc_feature (872)..(872): n is a, c, g, or t
  misc_feature (876)..(877): n is a, c, g, or t
  misc_feature (879)..(879): n is a, c, g, or t
  misc_feature (883)..(883): n is a, c, g, or t
  misc_feature (891)..(891): n is a, c, g, or t
  misc_feature (895)..(895): n is a, c, g, or t
  misc_feature (899)..(899): n is a, c, g, or t
  misc_feature (913)..(913): n is a, c, g, or t
  misc_feature (916)..(916): n is a, c, g, or t
  misc_feature (918)..(918): n is a, c, g, or t
  misc_feature (926)..(926): n is a, c, g, or t
  misc_feature (931)..(931): n is a, c, g, or t
  misc_feature (935)..(935): n is a, c, g, or t
  misc_feature (937)..(938): n is a, c, g, or t
  misc_feature (940)..(940): n is a, c, g, or t
  misc_feature (942)..(942): n is a, c, g, or t
  misc_feature (948)..(948): n is a, c, g, or t
  misc_feature (958)..(958): n is a, c, g, or t
  misc_feature (977)..(977): n is a, c, g, or t
  misc_feature (981)..(981): n is a, c, g, or t
  misc_feature (983)..(983): n is a, c, g, or t
  misc_feature (986)..(986): n is a, c, g, or t
  misc_feature (992)..(992): n is a, c, g, or t
  misc_feature (996)..(996): n is a, c, g, or t
  misc_feature (998)..(998): n is a, c, g, or t
  misc_feature (1008)..(1008): n is a, c, g, or t
  misc_feature (1013)..(1013): n is a, c, g, or t
  misc_feature (1016)..(1016): n is a, c, g, or t
  misc_feature (1018)..(1018): n is a, c, g, or t
  misc_feature (1027)..(1027): n is a, c, g, or t
  misc_feature (1032)..(1034): n is a, c, g, or t
  misc_feature (1041)..(1041): n is a, c, g, or t
  misc_feature (1044)..(1044): n is a, c, g, or t
  misc_feature (1049)..(1049): n is a, c, g, or t
  misc_feature (1052)..(1052): n is a, c, g, or t
  misc_feature (1056)..(1056): n is a, c, g, or t
  misc_feature (1059)..(1059): n is a, c, g, or t
  misc_feature (1064)..(1064): n is a, c, g, or t
  misc_feature (1069)..(1069): n is a, c, g, or t
  misc_feature (1072)..(1072): n is a, c, g, or t
  misc_feature (1077)..(1077): n is a, c, g, or t
  misc_feature (1083)..(1083): n is a, c, g, or t
  misc_feature (1086)..(1086): n is a, c, g, or t
  misc_feature (1106)..(1106): n is a, c, g, or t
  misc_feature (1115)..(1118): n is a, c, g, or t
  misc_feature (1122)..(1122): n is a, c, g, or t
  misc_feature (1126)..(1126): n is a, c, g, or t
  misc_feature (1128)..(1130): n is a, c, g, or t
  misc_feature (1135)..(1135): n is a, c, g, or t
  misc_feature (1138)..(1151): n is a, c, g, or t
  misc_feature (1153)..(1155): n is a, c, g, or t
  misc_feature (1157)..(1160): n is a, c, g, or t
  misc_feature (1165)..(1167): n is a, c, g, or t
  misc_feature (1170)..(1175): n is a, c, g, or t
  misc_feature (1179)..(1183): n is a, c, g, or t
  misc_feature (1185)..(1186): n is a, c, g, or t
  misc_feature (1188)..(1188): n is a, c, g, or t
  misc_feature (1191)..(1193): n is a, c, g, or t
  misc_feature (1195)..(1195): n is a, c, g, or t
  misc_feature (1197)..(1198): n is a, c, g, or t
  misc_feature (1200)..(1202): n is a, c, g, or t
  misc_feature (1204)..(1205): n is a, c, g, or t
  misc_feature (1208)..(1209): n is a, c, g, or t
  misc_feature (1211)..(1211): n is a, c, g, or t
  misc_feature (1215)..(1215): n is a, c, g, or t
  misc_feature (1219)..(1220): n is a, c, g, or t
  misc_feature (1222)..(1225): n is a, c, g, or t
  misc_feature (1228)..(1230): n is a, c, g, or t
  misc_feature (1232)..(1233): n is a, c, g, or t
  misc_feature (1235)..(1235): n is a, c, g, or t
  misc_feature (1241)..(1243): n is a, c, g, or t
  misc_feature (1246)..(1246): n is a, c, g, or t
  misc_feature (1248)..(1248): n is a, c, g, or t
  misc_feature (1253)..(1253): n is a, c, g, or t
  misc_feature (1258)..(1259): n is a, c, g, or t
  misc_feature (1262)..(1263): n is a, c, g, or t
  misc_feature (1267)..(1267): n is a, c, g, or t
  misc_feature (1271)..(1271): n is a, c, g, or t
  misc_feature (1278)..(1278): n is a, c, g, or t
  misc_feature (1280)..(1280): n is a, c, g, or t
  misc_feature (1284)..(1284): n is a, c, g, or t
  misc_feature (1288)..(1292): n is a, c, g, or t
  misc_feature (1298)..(1298): n is a, c, g, or t
  misc_feature (1301)..(1301): n is a, c, g, or t
  misc_feature (1304)..(1307): n is a, c, g, or t
  misc_feature (1310)..(1311): n is a, c, g, or t
  misc_feature (1315)..(1318): n is a, c, g, or t
  misc_feature (1320)..(1322): n is a, c, g, or t
  misc_feature (1332)..(1334): n is a, c, g, or t
ncannnnnnncaatnagagaaaattactatgagaggatcgcatcaccatcaccatcacggatcctatttaggtgacactatagaatcgtcgacccacgcgtccgcgctgtgcgcggcggacgtcggaggcagcggggagcggagcggggccgccggggcctctccagggccgcagcggcagcagttgggccccccgccccggccggcggaccgaagaacgcaggaagggggccggggggacccgcccccggccggccgcagccatgaactccaacgtggagaacctacccccgcacatcatccgcctggtgtacaaggaggtgacgacactgaccgcagacccacccgatggcatcaaggtctttcccaacgaggaggacctcaccgacctccaggtcaccatcgagggccctgaggggaccccatatgctggaggtctgttccgcatgaaactcctgctggggaaggacttccctgcctccccacccaagggctacttcctgaccaagatcttccacccgaacgtgggcgccaatggcgagatctgcgtcaacgtgctcaagagggactggacggntgagctgggcatccgacacgtactgctgaccatcaagtgcctgctgatccancctaaccccgagtctgcactcaacnaggaggcgggccgcctgctcttggagaactacgaggagtatgcagctcgggcccntctgctcacanatatccacgggggcgccggcggtcccancggcagggccgaagccggtcgggccctggtcagtggcactgaancttcntccaccgaaccctggggcccnaagnggnnccggnaaggngcttanggntcccaatggccaaaaaannatgntngntaanncnctantaaaaaantggntggncaaaaaaaaatatnggnanaaaaaacngggcncttncnncngnttatantgggtttttntttctttcttttcaacggnaaancnaanttttcnttgntncccttccttnacaanttntnttctttaanattannnaatttantgntgggnatngggnaanataanggggnaanttggnaaactnaanttttttttttttaaataaanttggaaaannnnaaanatantnnntttantannnnnnnnnnnnnntnnnannnnttatnnnaannnnnnaaannnnnannanaannnanannannnanntcnntnctantaannannnntannnanntnaataannnaantnttaantcttnnaannaaanttanaaaaacntnaaanctcnnnnnattttntanaannnnttnntttnnnngnnntttttttttnnnaaaaaa

SEQ ID NO: 8 - DNA, 1426 bp, Homo Sapiens
  misc_feature (2)..(2): n is a, c, g, or t
  misc_feature (103)..(103): n is a, c, g, or t
  misc_feature (618)..(618): n is a, c, g, or t
  misc_feature (709)..(709): n is a, c, g, or t
  misc_feature (761)..(761): n is a, c, g, or t
  misc_feature (781)..(781): n is a, c, g, or t
  misc_feature (807)..(807): n is a, c, g, or t
  misc_feature (859)..(859): n is a, c, g, or t
  misc_feature (868)..(868): n is a, c, g, or t
  misc_feature (886)..(886): n is a, c, g, or t
  misc_feature (889)..(889): n is a, c, g, or t
  misc_feature (893)..(893): n is a, c, g, or t
  misc_feature (896)..(896): n is a, c, g, or t
  misc_feature (912)..(912): n is a, c, g, or t
  misc_feature (916)..(916): n is a, c, g, or t
  misc_feature (951)..(951): n is a, c, g, or t
  misc_feature (957)..(957): n is a, c, g, or t
  misc_feature (962)..(962): n is a, c, g, or t
  misc_feature (967)..(967): n is a, c, g, or t
  misc_feature (976)..(976): n is a, c, g, or t
  misc_feature (981)..(981): n is a, c, g, or t
  misc_feature (985)..(985): n is a, c, g, or t
  misc_feature (996)..(996): n is a, c, g, or t
  misc_feature (998)..(998): n is a, c, g, or t
  misc_feature (1005)..(1006): n is a, c, g, or t
  misc_feature (1009)..(1009): n is a, c, g, or t
  misc_feature (1013)..(1013): n is a, c, g, or t
  misc_feature (1019)..(1019): n is a, c, g, or t
  misc_feature (1022)..(1022): n is a, c, g, or t
  misc_feature (1028)..(1028): n is a, c, g, or t
  misc_feature (1030)..(1030): n is a, c, g, or t
  misc_feature (1039)..(1040): n is a, c, g, or t
  misc_feature (1057)..(1057): n is a, c, g, or t
  misc_feature (1063)..(1063): n is a, c, g, or t
  misc_feature (1066)..(1066): n is a, c, g, or t
  misc_feature (1075)..(1075): n is a, c, g, or t
  misc_feature (1081)..(1082): n is a, c, g, or t
  misc_feature (1094)..(1094): n is a, c, g, or t
  misc_feature (1097)..(1097): n is a, c, g, or t
  misc_feature (1100)..(1100): n is a, c, g, or t
  misc_feature (1105)..(1105): n is a, c, g, or t
  misc_feature (1109)..(1109): n is a, c, g, or t
  misc_feature (1117)..(1117): n is a, c, g, or t
  misc_feature (1126)..(1126): n is a, c, g, or t
  misc_feature (1130)..(1130): n is a, c, g, or t
  misc_feature (1133)..(1134): n is a, c, g, or t
  misc_feature (1137)..(1137): n is a, c, g, or t
  misc_feature (1139)..(1140): n is a, c, g, or t
  misc_feature (1142)..(1142): n is a, c, g, or t
  misc_feature (1153)..(1154): n is a, c, g, or t
  misc_feature (1159)..(1160): n is a, c, g, or t
  misc_feature (1163)..(1163): n is a, c, g, or t
  misc_feature (1170)..(1170): n is a, c, g, or t
  misc_feature (1194)..(1194): n is a, c, g, or t
  misc_feature (1197)..(1198): n is a, c, g, or t
  misc_feature (1200)..(1201): n is a, c, g, or t
  misc_feature (1205)..(1205): n is a, c, g, or t
  misc_feature (1209)..(1209): n is a, c, g, or t
  misc_feature (1212)..(1212): n is a, c, g, or t
  misc_feature (1223)..(1223): n is a, c, g, or t
  misc_feature (1225)..(1226): n is a, c, g, or t
  misc_feature (1232)..(1232): n is a, c, g, or t
  misc_feature (1234)..(1234): n is a, c, g, or t
  misc_feature (1242)..(1242): n is a, c, g, or t
  misc_feature (1247)..(1250): n is a, c, g, or t
  misc_feature (1257)..(1257): n is a, c, g, or t
  misc_feature (1265)..(1265): n is a, c, g, or t
  misc_feature (1275)..(1275): n is a, c, g, or t
  misc_feature (1288)..(1288): n is a, c, g, or t
  misc_feature (1291)..(1291): n is a, c, g, or t
  misc_feature (1294)..(1294): n is a, c, g, or t
  misc_feature (1299)..(1299): n is a, c, g, or t
  misc_feature (1306)..(1306): n is a, c, g, or t
  misc_feature (1318)..(1318): n is a, c, g, or t
  misc_feature (1326)..(1327): n is a, c, g, or t
  misc_feature (1330)..(1330): n is a, c, g, or t
  misc_feature (1335)..(1335): n is a, c, g, or t
  misc_feature (1337)..(1337): n is a, c, g, or t
  misc_feature (1342)..(1343): n is a, c, g, or t
  misc_feature (1346)..(1346): n is a, c, g, or t
  misc_feature (1352)..(1352): n is a, c, g, or t
  misc_feature (1355)..(1355): n is a, c, g, or t
  misc_feature (1359)..(1359): n is a, c, g, or t
  misc_feature (1367)..(1367): n is a, c, g, or t
  misc_feature (1374)..(1374): n is a, c, g, or t
  misc_feature (1377)..(1379): n is a, c, g, or t
  misc_feature (1386)..(1386): n is a, c, g, or t
  misc_feature (1388)..(1388): n is a, c, g, or t
  misc_feature (1391)..(1391): n is a, c, g, or t
  misc_feature (1413)..(1414): n is a, c, g, or t
anaaagagaaattactatgagaggatcgcatcaccattcaccatcacggatcctatttaggtgacactatagaatcgtcgacccacgcgttccgcccacgcgntccggtgcagaccgtactccatccctccctgtgagcaccacgtcaacggctcccggcccccatgcacgggggagggagatacccccaagtgtagcaagatctgtgagcctggctacagcccgacctacaaacaggacaagcactacggatacaattcctacagcgtctccaatagcgagaaggacatcatggccgagatctacaaaaacggccccgtggagggagctttctctgtgtattcggacttcctgctctacaagtcaggagtgtaccaacacgtcaccggagagatgatgggtggccatgccatccgcatcctgggctggggagtggagaatggcacaccctactggctggttgccaactcctggaacactgactggggtgacaatggcttctttaaaatactcagaggacaggatcactgtggaatcgaatcagaagtggtggctggaattccacgcaccgatcagtactgggaaaagatctaatctgccgtgggcctgtcgtgccantcctgggggcgagatcggggtagaaatgcattttattctttaagttcacgtaagatacaagtttcaggcagggtctgaaggactggattgnccaaacatcagacctgtcttccaaggagaccaaagtcctggctacatcccancctgtggttacagtgcatanaaggccatgtgaagccaccgctgccngcacagaacgtccttccccctgtagactaattgcccgtaaggaagtacctgntgcccccanctggattgtggccccctncgntganccnttccatctccagggancaanaacaaatactcatggaattggaaaaccggaattcnttaaancgaanaaaantttcccccnatcantttncccccaaatancntccaaannaantaancttttnccnattttntnccaaaattnnaaaggaaaaaattggtntttggnaanccctttttnaaaaanncacagttttccnaanccnccttnaatntttttaanttttgaatnttcncannccncnntnaattttgtgcnnaaaannganttctttnaaaaaaatttttatttttttcttnacnntnngccnaatnatngggggtaaacncnntgaaantnacgtaaanctgtnnnnatttttnaaaaatgncccctaaaancacccgtcataanaanatnaaagntctcatnaaattttttttnccctcttnnttnctatnanaagtnnatnttattnaanaacntccttttnttattcnaannncatctcncnatntcattaaataaaaagtctatanncaaagattccca

SEQ ID NO: 9 - DNA, 256 bp, Homo Sapiens
aagcgggcgaggagcagcccatggagacgacgggcgccaccgagaacggacatgaggccgtccccgaaggcgagtcgccggccggggctggcacgggcgccgcggcgggggctggaggcgcgaccgcggcgcccccgagcgggaatcagaacggcgccgagggcgaccagatcaacgccagcaagaacgaggaggacgcgggaaaaatgttcgttggtggcctgagctgggatactagcaaaaaagatttaaaaga

SEQ ID NO: 10 - DNA, 256 bp, Homo Sapiens
  misc_feature (2)..(2): n is a, c, g, or t
tnaactatgagaggatcgcatcaccatcaccatcacggatcctatttaggtgacactatagaatcgtcgacccacgcgtccgatgctgagctggctactggcacacctcctgtatcaccctccaaactcggcaaccctgagcagatgctgagggggcaaccggcgctccccagacccccaacgtcagtggggcctgcttccccgcagtgtccaggagagaaggggcagggggctcccgccgaggctcccatcatcc

SEQ ID NO: 11 - DNA, 256 bp, Homo Sapiens
  misc_feature (4)..(4): n is a, c, g, or t
ttanctatgagaggatcgcatcaccatcaccatcacggatcctatttaggtgacactatagaatcgtcgacccacgcgtccggccagaagcagcctcaagatgcatctcctccgccaaaagaatgtgaccaaggaactctcagtgcatccctaaatccgagtaattcagagagtagtccttccagatgcccttcagacccagactccacctcccagccaaggtcaggggactctgcagatgtagctagagatgtaa

SEQ ID NO: 12 - DNA, 256 bp, Homo Sapiens
atagagaaaattactatgagaggatcgcatcaccatcaccatcacggatcctatttaggtgacactatagaatcgtcgacccacgcgtccgaggagagagccgccctcgagcggagcaaggcgattgagaaaaacctcaaagaggatggcatcagcgccgccaaagacgtgaaattactcctgctcggggctggagaatcaggaaaaagcaccattgtgaagcagatgaagatcatccatgaagatggcttctccg

SEQ ID NO: 13 - DNA, 1310 bp, Homo Sapiens
  misc_feature (818)..(818): n is a, c, g, or t
  misc_feature (887)..(887): n is a, c, g, or t
  misc_feature (889)..(889): n is a, c, g, or t
  misc_feature (913)..(913): n is a, c, g, or t
  misc_feature (949)..(949): n is a, c, g, or t
  misc_feature (977)..(977): n is a, c, g, or t
  misc_feature (979)..(979): n is a, c, g, or t
  misc_feature (1001)..(1001): n is a, c, g, or t
  misc_feature (1006)..(1006): n is a, c, g, or t
  misc_feature (1010)..(1010): n is a, c, g, or t
  misc_feature (1014)..(1015): n is a, c, g, or t
  misc_feature (1026)..(1026): n is a, c, g, or t
  misc_feature (1039)..(1039): n is a, c, g, or t
  misc_feature (1045)..(1045): n is a, c, g, or t
  misc_feature (1062)..(1088): n is a, c, g, or t
  misc_feature (1097)..(1097): n is a, c, g, or t
  misc_feature (1100)..(1100): n is a, c, g, or t
  misc_feature (1108)..(1108): n is a, c, g, or t
  misc_feature (1112)..(1113): n is a, c, g, or t
  misc_feature (1115)..(1115): n is a, c, g, or t
  misc_feature (1119)..(1119): n is a, c, g, or t
  misc_feature (1122)..(1122): n is a, c, g, or t
  misc_feature (1132)..(1132): n is a, c, g, or t
  misc_feature (1134)..(1134): n is a, c, g, or t
  misc_feature (1137)..(1137): n is a, c, g, or t
  misc_feature (1142)..(1142): n is a, c, g, or t
  misc_feature (1145)..(1145): n is a, c, g, or t
  misc_feature (1149)..(1149): n is a, c, g, or t
  misc_feature (1152)..(1152): n is a, c, g, or t
  misc_feature (1162)..(1164): n is a, c, g, or t
  misc_feature (1169)..(1169): n is a, c, g, or t
  misc_feature (1174)..(1174): n is a, c, g, or t
  misc_feature (1177)..(1178): n is a, c, g, or t
  misc_feature (1182)..(1182): n is a, c, g, or t
  misc_feature (1184)..(1184): n is a, c, g, or t
  misc_feature (1192)..(1192): n is a, c, g, or t
  misc_feature (1200)..(1200): n is a, c, g, or t
  misc_feature (1202)..(1204): n is a, c, g, or t
  misc_feature (1206)..(1206): n is a, c, g, or t
  misc_feature (1209)..(1209): n is a, c, g, or t
  misc_feature (1219)..(1219): n is a, c, g, or t
  misc_feature (1227)..(1227): n is a, c, g, or t
  misc_feature (1232)..(1232): n is a, c, g, or t
  misc_feature (1236)..(1236): n is a, c, g, or t
  misc_feature (1239)..(1242): n is a, c, g, or t
  misc_feature (1244)..(1245): n is a, c, g, or t
  misc_feature (1254)..(1255): n is a, c, g, or t
  misc_feature (1260)..(1260): n is a, c, g, or t
  misc_feature (1264)..(1267): n is a, c, g, or t
  misc_feature (1271)..(1274): n is a, c, g, or t
  misc_feature (1277)..(1278): n is a, c, g, or t
  misc_feature (1281)..(1282): n is a, c, g, or t
  misc_feature (1289)..(1289): n is a, c, g, or t
  misc_feature (1293)..(1293): n is a, c, g, or t
  misc_feature (1304)..(1304): n is a, c, g, or t
  misc_feature (1308)..(1308): n is a, c, g, or t
  misc_feature (1310)..(1310): n is a, c, g, or t
gagaaattactatgagaggatcgcatcaccatcaccatcacggatcctatttaggtgacactatagaatcgtcgacccacgcgtccgcccacgcgtccgccgaatggctggctgtggatgggttggtcagtccctccaacaacagcaaggaggatgccttctccgggacagattggatgttggagaaaatggatttgaaggagttcgacttggatgccctgttgggtatagatgacctggaaaccatgccagatgaccttctgaccacgttggatgacacttgtgatctctttgcccccctagtccaggagactaataagcagcccccccagacggtgaacccaattggccatctcccagaaagtttaacaaaacccgaccaggttgcccccttcaccttcttacaacctcttcccctttccccaggggtcctgtcctccactccagatcattcctttagtttagagctgggcagtgaagtggatatcactgaaggagataggaagccagactacactgcttacgttgccatgatccctcagtgcataaaggaggaagacaccccttcagataatgatagtggcatctgtatgagcccagagtcctatctggggtctcctcagcacagcccctctaccaggggctctccaaataggagcctcccatctccaggtgttctctgtgggtctgcccgtcccaaaccttacgatcctcctggagagaagatggtagcagcaaaagtaaagggtgagaaactggataagaagctgaaaaaaatggagcaaaacaagacagcagccactaggtaccgccagaanaagagggcggagcaggaggctcttactggtgagtgcaaagagctggaaaagaagaacgaggctctaaananagggcggattccctggccaagganatccagtacctgaaaaattgataaaaaagtccgcanggcaagggggaaaaaaagggtcccctantngaggaaatcaggagcgtcatgngcttntaanaaanngctgtaactgngggttccaataantatttngtagggaaaaaaaaaannnnnnnnnnnnnnnnnnnnnnnnnnnggggggccnccnccccaaangggnncnaaanaancttaattaancnaanttggnacnccgnttnaaaaaatccnnnaaggnccccnaanncccncnggattttnttcaaaancnnngnttncccccggggntttttttntgggnaaanccnnnntnnttgggggannttttngggnnnngggnnnnaannggnnaaaaaancccngggaaaccccntaantn

SEQ ID NO: 14 - DNA, 256 bp, Homo Sapiens
  misc_feature (1)..(1): n is a, c, g, or t
  misc_feature (4)..(5): n is a, c, g, or t
nacnntgagaggatcgcatcaccatcaccatcacggatcctatttaggtgacactatagaatcgtcgacccacgcgtccgcggacgcgtggggcgctgcggacactcggggcggcagtcggtctgtcagtcctcccgccaggtcccgcggcccgcacctgccgcccgcacctgcagctccgcacctgcggccagtgcctactgccctctcttgccgcccgcacctgcagccccgcacctgccgcttgcacctgcag

SEQ ID NO: 15 - DNA, 256 bp, Homo Sapiens
ccatccacaacctgctcatgggtgacaccaaggagcagcgcatcctgaaccatgtgctgcagcatgcggagcccgggaacgcacagagcgtgctggaggccattgacacctactgcgagcagaaggagtgggccatgaacgtgggcgacaagaaaggcaagatcgtggacgccgtgattcaggagcaccagccctccgtgctgctggagctgggggcctactgtggctactcagctgtgcgcatggcccgcctgct

SEQ ID NO: 16 - DNA, 1223 bp, Homo Sapiens
  misc_feature (875)..(875): n is a, c, g, or t
  misc_feature (904)..(904): n is a, c, g, or t
  misc_feature (907)..(907): n is a, c, g, or t
  misc_feature (947)..(947): n is a, c, g, or t
  misc_feature (968)..(968): n is a, c, g, or t
  misc_feature (971)..(971): n is a, c, g, or t
  misc_feature (983)..(983): n is a, c, g, or t
  misc_feature (994)..(994): n is a, c, g, or t
  misc_feature (1013)..(1013): n is a, c, g, or t
  misc_feature (1015)..(1015): n is a, c, g, or t
  misc_feature (1020)..(1020): n is a, c, g, or t
  misc_feature (1027)..(1027): n is a, c, g, or t
  misc_feature (1029)..(1029): n is a, c, g, or t
  misc_feature (1041)..(1041): n is a, c, g, or t
  misc_feature (1064)..(1064): n is a, c, g, or t
  misc_feature (1079)..(1079): n is a, c, g, or t
  misc_feature (1081)..(1081): n is a, c, g, or t
  misc_feature (1089)..(1089): n is a, c, g, or t
  misc_feature (1103)..(1103): n is a, c, g, or t
  misc_feature (1112)..(1112): n is a, c, g, or t
  misc_feature (1117)..(1117): n is a, c, g, or t
  misc_feature (1120)..(1120): n is a, c, g, or t
  misc_feature (1125)..(1125): n is a, c, g, or t
  misc_feature (1130)..(1130): n is a, c, g, or t
  misc_feature (1135)..(1135): n is a, c, g, or t
  misc_feature (1137)..(1137): n is a, c, g, or t
  misc_feature (1144)..(1145): n is a, c, g, or t
  misc_feature (1150)..(1152): n is a, c, g, or t
  misc_feature (1154)..(1154): n is a, c, g, or t
  misc_feature (1164)..(1164): n is a, c, g, or t
  misc_feature (1168)..(1168): n is a, c, g, or t
  misc_feature (1170)..(1170): n is a, c, g, or t
  misc_feature (1176)..(1176): n is a, c, g, or t
  misc_feature (1188)..(1188): n is a, c, g, or t
  misc_feature (1208)..(1208): n is a, c, g, or t
  misc_feature (1214)..(1214): n is a, c, g, or t
  misc_feature (1220)..(1220): n is a, c, g, or t
tagagaaattactatgagaggatcgcatcaccatcaccatcacggatcctatttaggtgacactatagaatcgtcgacccacgcgtccgtcttgctagattctcaggggctgctagattcatccctgatggcatcaggcactgccagccgctcagaggatgaggagtcactggcagggcagaagcgagcctcctcccaggccttgggcaccatccctaaacggagaagctcctccaggttcatcaagaggaagaagttcgatgatgagctggtggagagcagcctggcaaaatcttctacccgggcaaagggggccagtggggtggaaccagggcgctgttcggggagtgaaccctcctccagtgagaagaagaaggtatccaaagcccccagcactcctgtgccacccagcccagccccagcccctggactcaccaagcgtgtgaagaagagtaaacagccacttcaggtgaccaaggatctgggccgctggaagcctgcagatgacctcctgctcataaatgctgtgttgcagaccaacgacctgacctccgtccacctgggcgtgaaattcagctgccgcttcacccttcgggaggtccaggagcgttggtacgccctgctctacgatcctgtcatctccaagttggcctgtcaggccatgaggcagctgcacccagaggctattgcagccatccagagcaaggccctgtttagcaaggctgaggagcagctgctgagcaaagtgggatcgaccagccagcccaccttggagaccttccaggacctgctgcacagacaccctgatgccttctacctggcccgtaccgcgaaggccctgcaggcccactggcagctcatgaagcagtattacntgctggaggaaccagacagccgctgcccnaangggaccaagtgctgaacttctctgatgcaaagaactgatngatgacagtaactcaaggacntgngaaatgaggtcntggaacatganctgatgtggctgaacggcncnaaaancgaaaantncggcactggaanaaggaactgcttaatggcagggnttatggaagctttcnanggattaanttttcggaattcanaacaaactngcatnttncgggnccccnggggngnacctganngcccnnngngaaaatcccngggnanacaccnggatacccaatngtttggacttttttggaggnccggcntgaaanttc

SEQ ID NO: 17 - DNA, 1387 bp, Homo Sapiens
  misc_feature (1)..(1): n is a, c, g, or t
  misc_feature (845)..(845): n is a, c, g, or t
  misc_feature (898)..(898): n is a, c, g, or t
  misc_feature (987)..(987): n is a, c, g, or t
  misc_feature (1016)..(1016): n is a, c, g, or t
  misc_feature (1024)..(1024): n is a, c, g, or t
  misc_feature (1031)..(1032): n is a, c, g, or t
  misc_feature (1044)..(1044): n is a, c, g, or t
  misc_feature (1046)..(1046): n is a, c, g, or t
  misc_feature (1053)..(1053): n is a, c, g, or t
  misc_feature (1060)..(1060): n is a, c, g, or t
  misc_feature (1066)..(1066): n is a, c, g, or t
  misc_feature (1071)..(1071): n is a, c, g, or t
  misc_feature (1079)..(1079): n is a, c, g, or t
  misc_feature (1083)..(1083): n is a, c, g, or t
  misc_feature (1095)..(1095): n is a, c, g, or t
  misc_feature (1100)..(1100): n is a, c, g, or t
  misc_feature (1106)..(1106): n is a, c, g, or t
  misc_feature (1119)..(1119): n is a, c, g, or t
  misc_feature (1125)..(1125): n is a, c, g, or t
  misc_feature (1131)..(1131): n is a, c, g, or t
  misc_feature (1158)..(1158): n is a, c, g, or t
  misc_feature (1164)..(1164): n is a, c, g, or t
  misc_feature (1176)..(1176): n is a, c, g, or t
  misc_feature (1178)..(1179): n is a, c, g, or t
  misc_feature (1184)..(1184): n is a, c, g, or t
  misc_feature (1191)..(1191): n is a, c, g, or t
  misc_feature (1199)..(1199): n is a, c, g, or t
  misc_feature (1202)..(1202): n is a, c, g, or t
  misc_feature (1209)..(1209): n is a, c, g, or t
  misc_feature (1212)..(1213): n is a, c, g, or t
  misc_feature (1219)..(1219): n is a, c, g, or t
  misc_feature (1229)..(1229): n is a, c, g, or t
  misc_feature (1235)..(1236): n is a, c, g, or t
  misc_feature (1239)..(1239): n is a, c, g, or t
  misc_feature (1242)..(1242): n is a, c, g, or t
  misc_feature (1249)..(1249): n is a, c, g, or t
  misc_feature (1263)..(1263): n is a, c, g, or t
  misc_feature (1276)..(1276): n is a, c, g, or t
  misc_feature (1285)..(1285): n is a, c, g, or t
  misc_feature (1289)..(1289): n is a, c, g, or t
  misc_feature (1303)..(1303): n is a, c, g, or t
  misc_feature (1306)..(1306): n is a, c, g, or t
  misc_feature (1314)..(1314): n is a, c, g, or t
  misc_feature (1325)..(1327): n is a, c, g, or t
  misc_feature (1335)..(1338): n is a, c, g, or t
  misc_feature (1340)..(1350): n is a, c, g, or t
  misc_feature (1356)..(1356): n is a, c, g, or t
  misc_feature (1359)..(1359): n is a, c, g, or t
  misc_feature (1364)..(1364): n is a, c, g, or t
  misc_feature (1383)..(1384): n is a, c, g, or t
  misc_feature (1387)..(1387): n is a, c, g, or t
natagagagattactatgagaggatcgcatcaccatcaccatcacggatcctatttaggtgacactatagaatcgtcgacccacgcgtccggggccgggcggtttggccccttagcgcccgggcgtcggggcggtaaaaggccggcagaagggaggcacttgagaaatgtctttcctccaggacccaagtttcttcaccatggggatgtggtccattggtgcaggagccctgggggctgctgccttggcattgctgcttgccaacacagacgtgtttctgtccaagccccagaaagcggccctggagtacctggaggatatagacctgaaaacactggagaaggaaccaaggactttcaaagcaaaggagctatgggaaaaaaatggagctgtgattatggccgtgcggaggccaggctgtttcctctgtcgagaggaagctgcggatctgtcctccctgaaaagcatgttggaccagctgggcgtccccctctatgcagtggtaaaggagcacatcaggactgaagtgaaggatttccagccttatttcaaaggagaaatcttcctggatgaaaagaaaaagttctatggtccacaaaggcggaagatgatgtttatgggatttatccgtctgggagtgtggtacaacttcttccgagcctggaacggaggcttctctggaaacctggaaggagaaggcttcatccttgggggagttttcgtggtgggatcaggaaagcagggcattcttcttgagcaccgagaaaaagaatttggagacaaagtaaacctactttctgttctggaagctgctaagatgatcaaaccacagactttggcctcanagaaaaaatgattgtgtgaaactgcccagctcagggataaccagggacattcncctgtgttcatgggatgtattgtttccactcgtgtcctaaggagtgaaaaacccatttatactctactctcagtatggattattaaggnatttaaaaatccggttaagccccctaagncaaaatanccccaannaaactgaaaaantntgaaaanttattgnggattnttaanctaaaacntggnaaaaggaggctnaaatnactgcnagctgggggcaanggcccnactgtnatccccccttttggaagccaagggaanaatccnttgaggcgggantnnaaacnccctaanaaatgggnaanccccttncannaaaaanaaaaaccccngggggnnggnggnccctgtntcccccccccgggngtgaggggaaacnttaccgggngggnggtggggaaaaacnccngtttcccngggggggactnnnaaaaaaannnnannnnnnnnnnnaaaaanggnccccnaaaaaaaattttttttttnnttn

SEQ ID NO: 18 - DNA, 256 bp, Homo Sapiens
ttccctgcagccctcccacgggaatgacaatggataaaagtgagctggtacagaaagccaaactcgctgagcaggctgagcgctatgatgatatggctgcagccatgaaggcagtcacagaacaggggcatgaactctccaacgaagagagaaatctgctctctgttgcctacaagaatgtggtaggcgcccgccgctcttcctggcgtgtcatctccagcattgagcagaaaacagagaggaatgagaagaagca

SEQ ID NO: 19 - DNA, 1242 bp, Homo Sapiens
  misc_feature (806)..(806): n is a, c, g, or t
  misc_feature (905)..(905): n is a, c, g, or t
  misc_feature (916)..(916): n is a, c, g, or t
  misc_feature (925)..(925): n is a, c, g, or t
  misc_feature (928)..(929): n is a, c, g, or t
  misc_feature (961)..(961): n is a, c, g, or t
  misc_feature (973)..(973): n is a, c, g, or t
  misc_feature (1005)..(1005): n is a, c, g, or t
  misc_feature (1007)..(1007): n is a, c, g, or t
  misc_feature (1011)..(1011): n is a, c, g, or t
  misc_feature (1014)..(1014): n is a, c, g, or t
  misc_feature (1017)..(1017): n is a, c, g, or t
  misc_feature (1023)..(1023): n is a, c, g, or t
  misc_feature (1037)..(1037): n is a, c, g, or t
  misc_feature (1040)..(1040): n is a, c, g, or t
  misc_feature (1043)..(1043): n is a, c, g, or t
  misc_feature (1047)..(1048): n is a, c, g, or t
  misc_feature (1055)..(1056): n is a, c, g, or t
  misc_feature (1059)..(1059): n is a, c, g, or t
  misc_feature (1087)..(1088): n is a, c, g, or t
  misc_feature (1090)..(1091): n is a, c, g, or t
  misc_feature (1099)..(1099): n is a, c, g, or t
  misc_feature (1102)..(1102): n is a, c, g, or t
  misc_feature (1105)..(1105): n is a, c, g, or t
  misc_feature (1109)..(1109): n is a, c, g, or t
  misc_feature (1113)..(1113): n is a, c, g, or t
  misc_feature (1119)..(1119): n is a, c, g, or t
  misc_feature (1124)..(1124): n is a, c, g, or t
  misc_feature (1140)..(1140): n is a, c, g, or t
  misc_feature (1152)..(1152): n is a, c, g, or t
  misc_feature (1157)..(1157): n is a, c, g, or t
  misc_feature (1159)..(1159): n is a, c, g, or t
  misc_feature (1182)..(1182): n is a, c, g, or t
  misc_feature (1198)..(1198): n is a, c, g, or t
  misc_feature (1201)..(1201): n is a, c, g, or t
  misc_feature (1204)..(1204): n is a, c, g, or t
  misc_feature (1228)..(1228): n is a, c, g, or t
  misc_feature (1231)..(1232): n is a, c, g, or t
  misc_feature (1234)..(1234): n is a, c, g, or t
  misc_feature (1237)..(1237): n is a, c, g, or t
agagaaattactatgagaggatcgcatcaccatcaccatcacggatcctatttaggtgacactatagaatcgtcgacccacgcgtccgcgctccgaggtccccgcgccagagacgcagccgcgctcccaccacccacacccaccgcgccctcgttcgcctcttctccgggagccagtccgcgccaccgccgccgcccaggccatcgccaccctccgcagccatgtccaccaggtccgtgtcctcgtcctcctaccgcaggatgttcggcggcccgggcaccgcgagccggccgagctccagccggagctacgtgactacgtccacccgcacctacagcctgggcagcgcgctgcgccccagcaccagccgcagcctctacgcctcgtccccgggcggcgtgtatgccacgcgctcctctgccgtgcgcctgcggagcagcgtgcccggggtgcggctcctgcaggactcggtggacttctcgctggccgacgccatcaacaccgagttcaagaacacccgcaccaacgagaaggtggagctgcaggagctgaatgaccgcttcgccaactacatcgacaaggtgcgcttcctggagcagcagaataagatcctgctggccgagctcgagcagctcaagggccaaggcaagtcgcgcctgggggacctctacgaggaggagatgcgggagctgcgccggcaggtggaccagctaaccaacgacaaagcccgcgtcgaggtggagcgcgacaacctggccgaggacatcatgcgcctccgggagaaattgcaggaggagatgcttcanagagaggaagccgaaaacaccctgcaatctttcagacaggatgttgacaatgcgtctctggcacgtcttgaccttgaacgcaaagtggaatctttgcanaagagattgcntttttgaanaanntccacgaaaagaaatccaggagctgcaggctnaaattcaggaanagcatgtccaaatcgatgtggatgtttccaancntganctnaanggttgncctgggtgaagtangtnaanaatnngaaagtnnggntgcaaaaaacttgcaggaagcaaaaaanngnnaaaattcnaanttnggtnactntttganggttncaacggaaaaaagaanccttggccaggnaaaanangattccttgaatacgaaaaaggnggagtccctccctggnaangangccttaaagaaaaatgattcttgnaanncnaantggta

SEQ ID NO: 20 - DNA, 1214 bp, Homo Sapiens
  misc_feature (790)..(790): n is a, c, g, or t
  misc_feature (861)..(861): n is a, c, g, or t
  misc_feature (888)..(888): n is a, c, g, or t
  misc_feature (900)..(900): n is a, c, g, or t
  misc_feature (909)..(909): n is a, c, g, or t
  misc_feature (927)..(927): n is a, c, g, or t
  misc_feature (939)..(939): n is a, c, g, or t
  misc_feature (945)..(945): n is a, c, g, or t
  misc_feature (950)..(950): n is a, c, g, or t
  misc_feature (952)..(952): n is a, c, g, or t
  misc_feature (963)..(963): n is a, c, g, or t
  misc_feature (965)..(966): n is a, c, g, or t
  misc_feature (974)..(974): n is a, c, g, or t
  misc_feature (976)..(976): n is a, c, g, or t
  misc_feature (979)..(979): n is a, c, g, or t
  misc_feature (991)..(992): n is a, c, g, or t
  misc_feature (996)..(996): n is a, c, g, or t
  misc_feature (999)..(999): n is a, c, g, or t
  misc_feature (1004)..(1004): n is a, c, g, or t
  misc_feature (1015)..(1015): n is a, c, g, or t
  misc_feature (1023)..(1023): n is a, c, g, or t
  misc_feature (1026)..(1026): n is a, c, g, or t
  misc_feature (1028)..(1028): n is a, c, g, or t
  misc_feature (1031)..(1031): n is a, c, g, or t
  misc_feature (1033)..(1033): n is a, c, g, or t
  misc_feature (1035)..(1035): n is a, c, g, or t
  misc_feature (1040)..(1040): n is a, c, g, or t
  misc_feature (1045)..(1045): n is a, c, g, or t
  misc_feature (1047)..(1047): n is a, c, g, or t
  misc_feature (1049)..(1050): n is a, c, g, or t
  misc_feature (1054)..(1054): n is a, c, g, or t
  misc_feature (1057)..(1057): n is a, c, g, or t
  misc_feature (1061)..(1061): n is a, c, g, or t
  misc_feature (1064)..(1064): n is a, c, g, or t
  misc_feature (1066)..(1066): n is a, c, g, or t
  misc_feature (1071)..(1071): n is a, c, g, or t
  misc_feature (1079)..(1080): n is a, c, g, or t
  misc_feature (1084)..(1085): n is a, c, g, or t
  misc_feature (1088)..(1091): n is a, c, g, or t
  misc_feature (1093)..(1093): n is a, c, g, or t
  misc_feature (1097)..(1101): n is a, c, g, or t
  misc_feature (1112)..(1112): n is a, c, g, or t
  misc_feature (1114)..(1115): n is a, c, g, or t
  misc_feature (1117)..(1119): n is a, c, g, or t
  misc_feature (1121)..(1121): n is a, c, g, or t
  misc_feature (1123)..(1127): n is a, c, g, or t
  misc_feature (1129)..(1131): n is a, c, g, or t
  misc_feature (1135)..(1135): n is a, c, g, or t
  misc_feature (1140)..(1146): n is a, c, g, or t
  misc_feature (1148)..(1148): n is a, c, g, or t
  misc_feature (1150)..(1151): n is a, c, g, or t
  misc_feature (1153)..(1154): n is a, c, g, or t
  misc_feature (1156)..(1160): n is a, c, g, or t
  misc_feature (1162)..(1167): n is a, c, g, or t
  misc_feature (1170)..(1171): n is a, c, g, or t
  misc_feature (1175)..(1184): n is a, c, g, or t
  misc_feature (1188)..(1192): n is a, c, g, or t
  misc_feature (1195)..(1203): n is a, c, g, or t
  misc_feature (1208)..(1214): n is a, c, g, or t
agaaattactatgagaggatcgcatcaccatcaccatcacggatcctatttaggtgacactatagaatcgtcgacccacgcgtccgcttctccaggtgggctctggcagaggccaagctcgggcagggcaggccccatggggagcggggaggaatggtcacctctgctcaggtctcgccagcacgtttcccgggggacacagcagccagagagcccgaaggtggccggtgccgaggtggccgtcagctggccggaggtggaagaggccctggtactcctgcagctctgggcaaacctggacgtgctactggtggcctcttggcaggagctgagtcggcacgtgtgcgccgttaccaaggctctcgcccggtatcccctcaagcagtaccgggaatcccaggccttctccttctgcacagcagggcgctgggcagccggcgagccagtggcaagagacggcgcagggctgcaggcggcctggcggaggcagatcaggcagttcagtcgggtcagcccagccgtggctgatgcagttgtcacagccttcccctccccccgccttctgcagcaggcgctggaggcctgcagcacggagcgggagcgcatgggcctcctggccgaccttcctgtgccgcccagtgaaggcgggcgtccccgcagggtggggcctgacctctcccgccgcatctgcctcttcctgaccacagccaaccctgatctcctgctggacctgggctcctgaccacacgtgggaccaccaggacagcatgcagccttggggacagaccanacaccctgggcggttggggaggacccccagccacatgtggaccctcagcctgggtgggttctctggctgancaggtctgacctcagggggagggtggntggttgcagggnaaattttangtactggaaaaaaagggncttctggttggnaaatgnttggngnttcctgtgttnanncctgaacncntangccccagggaanntaanaanagggntgtgccccccnaaaaaaanaananttngnanggaanaaaangnanntccnggncccntgncnctggnggttgggnngggnnccnnnncnaaannnnngggaatcccangnntnnnangnnnnnannnttgnaaaannnnnnntntnnanncnnnnntnnnnnnaanntttnnnnnnnnnngggnnnnnaannnnnnnnnttttnnnnnnn

SEQ ID NO: 21 - DNA, 1399 bp, Homo Sapiens
  misc_feature (749)..(749): n is a, c, g, or t
  misc_feature (801)..(801): n is a, c, g, or t
  misc_feature (816)..(816): n is a, c, g, or t
  misc_feature (835)..(835): n is a, c, g, or t
  misc_feature (841)..(841): n is a, c, g, or t
  misc_feature (847)..(847): n is a, c, g, or t
  misc_feature (850)..(850): n is a, c, g, or t
  misc_feature (866)..(866): n is a, c, g, or t
  misc_feature (875)..(875): n is a, c, g, or t
  misc_feature (898)..(898): n is a, c, g, or t
  misc_feature (918)..(918): n is a, c, g, or t
  misc_feature (921)..(921): n is a, c, g, or t
  misc_feature (923)..(924): n is a, c, g, or t
  misc_feature (926)..(926): n is a, c, g, or t
  misc_feature (928)..(928): n is a, c, g, or t
  misc_feature (937)..(937): n is a, c, g, or t
  misc_feature (947)..(947): n is a, c, g, or t
  misc_feature (951)..(951): n is a, c, g, or t
  misc_feature (956)..(956): n is a, c, g, or t
  misc_feature (958)..(959): n is a, c, g, or t
  misc_feature (961)..(961): n is a, c, g, or t
  misc_feature (982)..(982): n is a, c, g, or t
  misc_feature (991)..(993): n is a, c, g, or t
  misc_feature (1002)..(1004): n is a, c, g, or t
  misc_feature (1007)..(1007): n is a, c, g, or t
  misc_feature (1013)..(1014): n is a, c, g, or t
  misc_feature (1020)..(1023): n is a, c, g, or t
  misc_feature (1025)..(1025): n is a, c, g, or t
  misc_feature (1029)..(1029): n is a, c, g, or t
  misc_feature (1035)..(1035): n is a, c, g, or t
  misc_feature (1045)..(1046): n is a, c, g, or t
  misc_feature (1052)..(1052): n is a, c, g, or t
  misc_feature (1059)..(1059): n is a, c, g, or t
  misc_feature (1061)..(1061): n is a, c, g, or t
  misc_feature (1066)..(1066): n is a, c, g, or t
  misc_feature (1070)..(1070): n is a, c, g, or t
  misc_feature (1077)..(1077): n is a, c, g, or t
  misc_feature (1096)..(1096): n is a, c, g, or t
  misc_feature (1098)..(1098): n is a, c, g, or t
  misc_feature (1110)..(1110): n is a, c, g, or t
  misc_feature (1112)..(1112): n is a, c, g, or t
  misc_feature (1114)..(1114): n is a, c, g, or t
  misc_feature (1121)..(1121): n is a, c, g, or t
  misc_feature (1124)..(1128): n is a, c, g, or t
  misc_feature (1130)..(1130): n is a, c, g, or t
  misc_feature (1136)..(1137): n is a, c, g, or t
  misc_feature (1139)..(1139): n is a, c, g, or t
  misc_feature (1144)..(1145): n is a, c, g, or t
  misc_feature (1149)..(1149): n is a, c, g, or t
  misc_feature (1151)..(1151): n is a, c, g, or t
  misc_feature (1153)..(1154): n is a, c, g, or t
  misc_feature (1171)..(1172): n is a, c, g, or t
  misc_feature (1174)..(1174): n is a, c, g, or t
  misc_feature (1177)..(1177): n is a, c, g, or t
  misc_feature (1180)..(1180): n is a, c, g, or t
  misc_feature (1184)..(1185): n is a, c, g, or t
  misc_feature (1191)..(1195): n is a, c, g, or t
  misc_feature (1202)..(1202): n is a, c, g, or t
  misc_feature (1205)..(1207): n is a, c, g, or t
  misc_feature (1209)..(1209): n is a, c, g, or t
  misc_feature (1212)..(1212): n is a, c, g, or t
  misc_feature (1216)..(1217): n is a, c, g, or t
  misc_feature (1221)..(1222): n is a, c, g, or t
  misc_feature (1229)..(1229): n is a, c, g, or t
  misc_feature (1231)..(1231): n is a, c, g, or t
  misc_feature (1234)..(1234): n is a, c, g, or t
  misc_feature (1240)..(1240): n is a, c, g, or t
  misc_feature (1243)..(1244): n is a, c, g, or t
  misc_feature (1250)..(1253): n is a, c, g, or t
  misc_feature (1256)..(1258): n is a, c, g, or t
  misc_feature (1263)..(1264): n is a, c, g, or t
  misc_feature (1266)..(1268): n is a, c, g, or t
  misc_feature (1271)..(1271): n is a, c, g, or t
  misc_feature (1273)..(1274): n is a, c, g, or t
  misc_feature (1277)..(1277): n is a, c, g, or t
  misc_feature (1279)..(1280): n is a, c, g, or t
  misc_feature (1286)..(1287): n is a, c, g, or t
  misc_feature (1290)..(1290): n is a, c, g, or t
  misc_feature (1295)..(1296): n is a, c, g, or t
  misc_feature (1301)..(1301): n is a, c, g, or t
  misc_feature (1303)..(1303): n is a, c, g, or t
  misc_feature (1306)..(1306): n is a, c, g, or t
  misc_feature (1309)..(1310): n is a, c, g, or t
  misc_feature (1313)..(1314): n is a, c, g, or t
  misc_feature (1316)..(1316): n is a, c, g, or t
  misc_feature (1319)..(1319): n is a, c, g, or t
  misc_feature (1321)..(1321): n is a, c, g, or t
  misc_feature (1325)..(1325): n is a, c, g, or t
  misc_feature (1329)..(1329): n is a, c, g, or t
  misc_feature (1334)..(1334): n is a, c, g, or t
  misc_feature (1336)..(1341): n is a, c, g, or t
  misc_feature (1343)..(1355): n is a, c, g, or t
  misc_feature (1357)..(1358): n is a, c, g, or t
  misc_feature (1364)..(1367): n is a, c, g, or t
  misc_feature (1370)..(1370): n is a, c, g, or t
  misc_feature (1372)..(1372): n is a, c, g, or t
  misc_feature (1375)..(1375): n is a, c, g, or t
  misc_feature (1395)..(1398): n is a, c, g, or t
aatagagaaattactatgagaggatcgcatcaccatcaccatcacgggatcctatttaggtgacactatagaatcgtcgacccacgcgtccgcttcctcattaagagcttcaatgacttcaactcctccccctccagtacctcccccacctccacctccagccactgctttgcaagctccagcagtaccaccacctccagctcctcttcagattgcccctggagttcttcacccagctcctcctccaattgcacctcctctagtacagccctctccaccagtagctagagctgccccagtatgtgagactgtaccagttcatccactcccacaaggtgaagttcaggggctgcctccacccccaccaccgcctcctctgcctccacctggcattcgaccatcatcacctgtcacagttacagctcttgctcatcctccctctgggctacatccaactccatctactgccccaggtccccatgttccattaatgcctccatctcctccatcacaagttatacctgcttctgagccaaagcgccatccatcaaccctacctgtaatcagtgatgccaggagtgtgctactggaagcaatacgaaaaggtattcagctacgcaaagtagaagagcagcgtgaacaggaagctaagcatgaacgcattgaaaacgatgttgccaccatcctgtctcgccgtattgctgttgaatatagtgattcggaagatgattcagaatttgatgaagtanattggttggagtaagaaaaaatgcattgataaatattacaaaactgaatgcnaatgtcctttgtggngcttgttccttgaaaatgnttgggncattcnagngttttgctttcttttnccttataanaaatgacccttttcctccataanttttgatttctaaggaaaanatnannananatttcaaantaaaggtttnaaanggggntnncnttttttttcccctgaaaagantaatttggnnnaaaaaacannnaantataannagggannnntngtgntaaaanaaaaaattcnntttttngaaaaancnaaatngggnattgggnaatttaatttaaaaaaggnanggaaattgaatntngnggggagnggnnnnnanaaaggnncntaatnnattncngnnggttaaaaaaaaaaaanngnctngantaannaaaaannnnnaaaaaanttnnntnggngggnnaatnnttaaggnanggnggaatnttnnaaaggnnnnggnnnaaaanngnnnaangnnggnannaacccnnccntaaannggggnanaanttnnggnnanagnanaaantttnggganannnnnnannnnnnnnnnnnngnnaaaaannnnaananggntttaaaaaaaaaaaaagggnnnna

SEQ ID NO: 22 - DNA, 256 bp, Homo Sapiens
  misc_feature (1)..(3): n is a, c, g, or t
nnnctatgagaggatcgcatcaccatcaccatcacggatcctatttaggtgacactatagaatcgtcgacccacgcgtccgctccaacagacatcgctattgcggttccgaggcagtgggaagagatgcggcccctggacatcgtcgagctggcggaaccggaggaagtggaggtgctggagcccgaggaggatttcgagcagtttctgctcccggtcatcaacgagatgcgcgaggacatcgcgtcgctgacgcg

SEQ ID NO: 23 - DNA, 256 bp, Homo Sapiens
ttattaaagaggagaaataactatgagaggatcgcatcaccatcaccatcacggatcctatttaggtgacactatagaatcgtcgacccacgcgtccgcccacgcgtccgcgcgccagtcccgagcagtgctcgctcctgctcggggcgctgcggccccgggcgtcgccatgaccagtgagctggacatcttcgtggggaacacgacccttatcgacgaggacgtgtatcgcctctggctcgatggttactcggtg

SEQ ID NO: 24 - DNA, 1271 bp, Homo Sapiens
  misc_feature (928)..(928): n is a, c, g, or t
  misc_feature (975)..(975): n is a, c, g, or t
  misc_feature (981)..(981): n is a, c, g, or t
  misc_feature (987)..(987): n is a, c, g, or t
  misc_feature (993)..(993): n is a, c, g, or t
  misc_feature (996)..(996): n is a, c, g, or t
  misc_feature (1039)..(1039): n is a, c, g, or t
  misc_feature (1042)..(1042): n is a, c, g, or t
  misc_feature (1065)..(1065): n is a, c, g, or t
  misc_feature (1094)..(1094): n is a, c, g, or t
  misc_feature (1096)..(1096): n is a, c, g, or t
  misc_feature (1106)..(1106): n is a, c, g, or t
  misc_feature (1113)..(1113): n is a, c, g, or t
  misc_feature (1117)..(1117): n is a, c, g, or t
  misc_feature (1131)..(1132): n is a, c, g, or t
  misc_feature (1134)..(1135): n is a, c, g, or t
  misc_feature (1137)..(1137): n is a, c, g, or t
  misc_feature (1141)..(1141): n is a, c, g, or t
  misc_feature (1144)..(1144): n is a, c, g, or t
  misc_feature (1151)..(1151): n is a, c, g, or t
  misc_feature (1165)..(1165): n is a, c, g, or t
  misc_feature (1170)..(1170): n is a, c, g, or t
  misc_feature (1176)..(1176): n is a, c, g, or t
  misc_feature (1181)..(1183): n is a, c, g, or t
  misc_feature (1185)..(1185): n is a, c, g, or t
  misc_feature (1190)..(1190): n is a, c, g, or t
  misc_feature (1201)..(1201): n is a, c, g, or t
  misc_feature (1205)..(1209): n is a, c, g, or t
  misc_feature (1213)..(1213): n is a, c, g, or t
  misc_feature (1222)..(1223): n is a, c, g, or t
  misc_feature (1230)..(1231): n is a, c, g, or t
  misc_feature (1236)..(1236): n is a, c, g, or t
  misc_feature (1239)..(1241): n is a, c, g, or t
  misc_feature (1244)..(1245): n is a, c, g, or t
  misc_feature (1248)..(1248): n is a, c, g, or t
  misc_feature (1258)..(1258): n is a, c, g, or t
  misc_feature (1260)..(1260): n is a, c, g, or t
  misc_feature (1267)..(1267): n is a, c, g, or t
  misc_feature (1271)..(1271): n is a, c, g, or t
attagagaaattactatgagaggatcgcatcaccatcaccatcacggatcctatttaggtgacactatagaatcgtcgacccacgcgtccgattgtcggctttcgccaaatcacaaagtcctgcattacggagacttagaagagagtcctcagggagaagtgccccacgattccttgcaggacaaactgccggtggcagatatcaaagccgtggtgacgggaaaggactgccctcatatgaaagagaaaggtgcccttaaacaaaacaaggaggtgcttgaactcgctttctccatcttgtatgactcaaactgccaactgaacttcatcgctcctgacaagcatgagtactgtatctggacggatggactgaatgcgctactcgggaaggacatgatgagcgacctgacgcggaatgacctggacaccctgctcagcatggaaatcaagctccgcctcctggacctggaaaacatccagatccctgacgcacctccgccgattcccaaggagcccagcaactatgacttcgtctatgactgtaactgaagtggccgggcccagacatgccccttccaaaactggaacacctagctaacaggagagaggaatgaaaacacacccacgccttggaaccgtcctttggtaaagggaagctgtgggtccacattcccttcagcatcacctctagccctggcaactttcagcccctagctggcatcttgctcaccgccctgattctgttcctcggctccactgcttcaggtcacttcccatggctgcagtccactggtgggacaagagcaaagcccactgccagtaagaaggccaaagggcccttccatcctagccctctgcaggcatgcccttccttcccttgggcaggaaagccagcagccccagactgcccaaaaacttgccccaccanaccaagggcagtgccccaagggcccctgtctggaggaaatggcctanctattngatganaaaacnaanccccacatcctcctttcccctctctctaaaatcatctcgcacnccngttacccttgaattaaaatctgngctcaaatctcctccccacctctctcccngntttgccttgnctcggtncccnttgggccccaaaannannancccnaanccccccngggatcctcccaanaaaantttccnaaaannncnaaggncccaggccccntttnnnnncgcnctgggattnnaaaaaannttccnccnnncannaanttgggggttncnccccccncccn

SEQ ID NO: 25 - DNA, 256 bp, Homo Sapiens
gtaaagctaatccacaggataaagtacatcccaataaagcggaattcatcagagccaagtatcagatgttagcgttcgtccatcgcttgccctgccgggatgacgatagtgtgactgccaaagatcttagcaagcaactccattcgagcgtgagaacagggaatcttgaaacctgtttgagactgttatctttaggagcacaagccaacttctttcatcctgaaaaaggaaacaccccactccatgttgcctccaa

SEQ ID NO: 26 - DNA, 256 bp, Homo Sapiens
atcgggtcttcccgcccctgacctcgctgcctggccccgtctacgagaagtgcatggcaccgccttccgccagctgcctgggggacgcccagctggagagcctgggggcggacaatgagccggagctggaagccgagatgcccgcacaggaggatgacctggagggggtcgtggaggctgtggcctgctttgcctacacgggccgcacagcccaggagctgagcttccggcggggggacgtactgcggctgcacga

SEQ ID NO: 27 - DNA, 256 bp, Homo Sapiens
  misc_feature (5)..(5): n is a, c, g, or t
tcganaatataaaaaattatttgctttgtgagcggatacaatataatagattaattgtgagcggataacaatttacacagaattattaaagaggagaaattaactatgagaggatcgcatcaccatcaccatcacggatcctatttaggtgacactatagaatcgtcgacccacgcgtccggggacagcagccacttcatctcagggggcaaggactgcctggtgctggtttggagcctctgcagcgtgctgcagg

SEQ ID NO: 28 - DNA, 256 bp, Homo Sapiens
ttgaaagtgtgatgaacagtgtggtatccctactcttgatcctggaaccagacaagcaagaagctttgattgaaagcctatgtgaaaagctggtcaaatttcgcgaaggtgaacgcccgtctctgagactgcagttgttaagcaaccttttccacgggatggataagaatactcctgtaagatacacagtgtattgcagccttattaaagtggcagcatcttgtggggccatccagtacatcccaactgagctgga

SEQ ID NO: 29 - DNA, 1200 bp, Homo Sapiens
  misc_feature (967)..(967): n is a, c, g, or t
  misc_feature (987)..(987): n is a, c, g, or t
  misc_feature (998)..(998): n is a, c, g, or t
  misc_feature (1016)..(1016): n is a, c, g, or t
  misc_feature (1041)..(1041): n is a, c, g, or t
  misc_feature (1044)..(1044): n is a, c, g, or t
  misc_feature (1050)..(1051): n is a, c, g, or t
  misc_feature (1066)..(1066): n is a, c, g, or t
  misc_feature (1068)..(1068): n is a, c, g, or t
  misc_feature (1071)..(1071): n is a, c, g, or t
  misc_feature (1074)..(1074): n is a, c, g, or t
  misc_feature (1079)..(1079): n is a, c, g, or t
  misc_feature (1081)..(1081): n is a, c, g, or t
  misc_feature (1086)..(1086): n is a, c, g, or t
  misc_feature (1095)..(1095): n is a, c, g, or t
  misc_feature (1097)..(1097): n is a, c, g, or t
  misc_feature (1099)..(1099): n is a, c, g, or t
  misc_feature (1110)..(1110): n is a, c, g, or t
  misc_feature (1118)..(1118): n is a, c, g, or t
  misc_feature (1120)..(1120): n is a, c, g, or t
  misc_feature (1129)..(1129): n is a, c, g, or t
  misc_feature (1133)..(1133): n is a, c, g, or t
  misc_feature (1135)..(1135): n is a, c, g, or t
  misc_feature (1137)..(1137): n is a, c, g, or t
  misc_feature (1139)..(1139): n is a, c, g, or t
  misc_feature (1143)..(1143): n is a, c, g, or t
  misc_feature (1153)..(1153): n is a, c, g, or t
  misc_feature (1164)..(1164): n is a, c, g, or t
  misc_feature (1167)..(1168): n is a, c, g, or t
  misc_feature (1191)..(1191): n is a, c, g, or t
  misc_feature (1194)..(1194): n is a, c, g, or t
  misc_feature (1199)..(1199): n is a, c, g, or t
attagagagaattactatgagaggatcgcatcaccatcaccatcacggatcctatttaggtgacactatagaatcgtcgacccacgcgtccgctgaatttcttgtctcagaggcagaagtgagaaaagaaactgaaacaaaaaaggattctgaagaaatgttgaaagcaaagaagagagtttttccattgagtccagcgtcaaatctgagagtgcagcctaagaggaaggccagcatgccccacatggtgcagagtaaaaaggtgaacttgtgccgcccctttcccaaaagaactgcttccagagcagacaacagctcggactctccaacaactcttaagttagttaaaggacagtttcctcagaaaagaaaaagaggtgcggaagtgctgactgcacagtttgtacagaaaaccaaattggataggaaaaaccaagaagctcctatttctaaagatgttccagtgccaacaaatgctaaaagggcaaggaaacaagagaaatctccagtcaaaactgttccaagggctaagccacctgtgaagaaatctccacaaaaacagagagtaaatatagtaaaaggcaatgagaaccccagaaacagaaagcagctacaacctgtcaaaggagaaactgcttcaaagcttcaatcagaaatttcaagaggtggtcaagaagatgggattagcataaatagtgttcaaccagaaaataccacagcggctcacaatgatcttcctgaaaactccatcgtcaactatgactcccaggccctaaatatgttagccgatctagcattaagctctgctacttcttccacaccagtatctgaggctagaaatcttcactgttcctctgaattgccacaaaatgatgttttgctctctaaagaaaattctttgcgaggtacatctgaccctgaatatcatagaggagttaaactcaaaaggtgaattactacctaaccntcttctgataggaagagtanttctggatcanacttaactgttacccaanatgaaaaaagcttggttccttgtantcnggcccnngctaaagcccagtcngnccnttnctggngnaatgnctaaaatcntncnaatgcaagccnaagcctcntntgttttttngggnanantntttntgccccggcnccttacgaaanttnnaaaaaactctcccggggaaaaanaanctaanc

SEQ ID NO: 30 - DNA, 1200 bp, Homo Sapiens
  misc_feature (1)..(1): n is a, c, g, or t
  misc_feature (4)..(4): n is a, c, g, or t
  misc_feature (740)..(740): n is a, c, g, or t
  misc_feature (797)..(797): n is a, c, g, or t
  misc_feature (823)..(823): n is a, c, g, or t
  misc_feature (829)..(829): n is a, c, g, or t
  misc_feature (838)..(838): n is a, c, g, or t
  misc_feature (874)..(874): n is a, c, g, or t
  misc_feature (885)..(886): n is a, c, g, or t
  misc_feature (889)..(889): n is a, c, g, or t
  misc_feature (902)..(902): n is a, c, g, or t
  misc_feature (908)..(908): n is a, c, g, or t
  misc_feature (933)..(933): n is a, c, g, or t
  misc_feature (937)..(937): n is a, c, g, or t
  misc_feature (943)..(944): n is a, c, g, or t
  misc_feature (959)..(959): n is a, c, g, or t
  misc_feature (963)..(963): n is a, c, g, or t
  misc_feature (973)..(973): n is a, c, g, or t
  misc_feature (980)..(980): n is a, c, g, or t
  misc_feature (989)..(989): n is a, c, g, or t
  misc_feature (1006)..(1006): n is a, c, g, or t
  misc_feature (1008)..(1008): n is a, c, g, or t
  misc_feature (1013)..(1013): n is a, c, g, or t
  misc_feature (1017)..(1017): n is a, c, g, or t
  misc_feature (1019)..(1019): n is a, c, g, or t
  misc_feature (1025)..(1025): n is a, c, g, or t
  misc_feature (1028)..(1028): n is a, c, g, or t
  misc_feature (1035)..(1036): n is a, c, g, or t
  misc_feature (1046)..(1046): n is a, c, g, or t
  misc_feature (1051)..(1051): n is a, c, g, or t
  misc_feature (1056)..(1056): n is a, c, g, or t
  misc_feature (1060)..(1060): n is a, c, g, or t
  misc_feature (1063)..(1064): n is a, c, g, or t
  misc_feature (1066)..(1070): n is a, c, g, or t
  misc_feature (1077)..(1078): n is a, c, g, or t
  misc_feature (1081)..(1083): n is a, c, g, or t
  misc_feature (1085)..(1085): n is a, c, g, or t
  misc_feature (1096)..(1096): n is a, c, g, or t
  misc_feature (1098)..(1098): n is a, c, g, or t
  misc_feature (1101)..(1101): n is a, c, g, or t
  misc_feature (1104)..(1105): n is a, c, g, or t
  misc_feature (1108)..(1108): n is a, c, g, or t
  misc_feature (1114)..(1114): n is a, c, g, or t
  misc_feature (1118)..(1118): n is a, c, g, or t
  misc_feature (1128)..(1128): n is a, c, g, or t
  misc_feature (1134)..(1135): n is a, c, g, or t
  misc_feature (1142)..(1142): n is a, c, g, or t
  misc_feature (1149)..(1149): n is a, c, g, or t
  misc_feature (1157)..(1158): n is a, c, g, or t
  misc_feature (1167)..(1167): n is a, c, g, or t
  misc_feature (1172)..(1172): n is a, c, g, or t
  misc_feature (1174)..(1175): n is a, c, g, or t
  misc_feature (1179)..(1181): n is a, c, g, or t
  misc_feature (1187)..(1188): n is a, c, g, or t
natngagaaattactatgagaggatcgcatcaccatcaccatcacggatcctatttaggtgacactatagaatcgtcgacccacgcgtccgcccaggacaagacaagccgctctgcactccctgatgcggcccctgtgaccaaagacagtggtcctgggagcacaagaggagaaaaggaagacacgttattgacaaccatgcttcgaaacggagctcccctcaccagactcccgagtgacaagctgaaagcagtcatccccccattcctacccccttccagttttgagctgtggagctctgatcggtcccggacgcgtcacaacgggaaggcagaccccatgaagactgcgctgccccagagagccagcaggggccaccccgtgggcggcgggggcacagacactacacccgtcaggcctgttaaatttccaagcctccccagaagcccagcctcttctgccaattctggaaacttcaaccactcgcctcattcatcgggcggctccagtgggataggtgtgagccggcacggtggggagctgcttaaccgctcaggtggcagcatagacaatgtcttgtcccaaatcgctgcccagaggaaaaaagcagccggattattggagcagaaacccagccatcggtcaagccctgtggggccagcaccggggtccagcccgtctgagcttccagcctcccctgcaggtggcagcgctcctgttggcaagaaattggagaccancaaaaggcctccatctggaacttccactacctccaagagcacctctccaaccctcangccctcccccttcaccaaagggcacnctgcanagtcctcantgtcttcctcgtcatcccatcggcagtcaaaaacantgggggctccnncantggcaccatccanaatgangatgaactgactggaattccttaanaaanttatcnnttgaaaaaatatcancccnattttttgangaacaanaaggtgganatggaaacgtttcttcnanctganttgnanggtganttnaaagganntgggaaattnaaaanaaaangggntcnngnnnnnaaatttnnggnnncnaatttttgaantnaanccnnggnaagggnaccnaaaaaaaaanttttannggaaacntttcaancttttccnntttcctttnaaaananngccnnnaaaacnngggccctggaaa

SEQ ID NO: 31 - DNA, 256 bp, Homo Sapiens
gcccagctacaggcgggcgactgcggggggcccctgaggcggcgggggccatggctggggtcgcgtgcttgggaaaagctgccgacgcagatgaatggtgcgacagcggcctgggctccctgggtccggacgcagcggcccccggaggacctgggttgggcgcggagttgggcccggggctgtcgtgggctcccctcgtcttcggctacgtcactgaggatggggacacggcactgcacttggctgtgattcatca

SEQ ID NO: 32 - DNA, 256 bp, Homo Sapiens
  misc_feature (6)..(6): n is a, c, g, or t
  misc_feature (90)..(90): n is a, c, g, or t
  misc_feature (99)..(99): n is a, c, g, or t
  misc_feature (101)..(102): n is a, c, g, or t
  misc_feature (108)..(108): n is a, c, g, or t
  misc_feature (116)..(116): n is a, c, g, or t
  misc_feature (127)..(128): n is a, c, g, or t
  misc_feature (133)..(135): n is a, c, g, or t
  misc_feature (146)..(148): n is a, c, g, or t
  misc_feature (150)..(150): n is a, c, g, or t
  misc_feature (164)..(164): n is a, c, g, or t
  misc_feature (168)..(168): n is a, c, g, or t
  misc_feature (178)..(178): n is a, c, g, or t
  misc_feature (193)..(193): n is a, c, g, or t
  misc_feature (202)..(202): n is a, c, g, or t
  misc_feature (231)..(231): n is a, c, g, or t
tagagnaattactatgagaggatcgcatcaccatcaccatcacggatcctatttaggtgacactatagaatcgtcgacccacgcgtccgnccacatttncnnaaaaanggttgagncttgcttaccnncgccnnnacccactcagnnnanggaatgtctccccnctgncagaactcangccattgctgcattnatttgcaanctgtgccgagtgaggactgtggagatatncatgacatgatcatgcctgaatgtc

SEQ ID NO: 33 - DNA, 256 bp, Homo Sapiens
  misc_feature (1)..(3): n is a, c, g, or t
  misc_feature (6)..(6): n is a, c, g, or t
nnnctntgagaggatcgcatcaccatcaccatcacggatcctatttaggtgacactatagaatcgtcgacccacgcgtccgaccacctgccccagatggagaccctcatgctcaacaacaacgctctcagtgccttgcaccagcagacggtggagtccctgcccaacctgcaggaggtaggtctccacggcaaccccatccgctgtgactgtgtcatccgctgggccaatgccacgggcacccgtgtccgcttcat

SEQ ID NO: 34 - DNA, 1382 bp, Homo Sapiens
  misc_feature (7)..(7): n is a, c, g, or t
  misc_feature (796)..(796): n is a, c, g, or t
  misc_feature (803)..(803): n is a, c, g, or t
  misc_feature (931)..(931): n is a, c, g, or t
  misc_feature (949)..(949): n is a, c, g, or t
  misc_feature (958)..(958): n is a, c, g, or t
  misc_feature (964)..(964): n is a, c, g, or t
  misc_feature (969)..(969): n is a, c, g, or t
  misc_feature (974)..(974): n is a, c, g, or t
  misc_feature (981)..(981): n is a, c, g, or t
  misc_feature (984)..(984): n is a, c, g, or t
  misc_feature (994)..(994): n is a, c, g, or t
  misc_feature (1000)..(1000): n is a, c, g, or t
  misc_feature (1004)..(1004): n is a, c, g, or t
  misc_feature (1019)..(1019): n is a, c, g, or t
  misc_feature (1023)..(1024): n is a, c, g, or t
  misc_feature (1040)..(1040): n is a, c, g, or t
  misc_feature (1048)..(1048): n is a, c, g, or t
  misc_feature (1069)..(1070): n is a, c, g, or t
  misc_feature (1080)..(1080): n is a, c, g, or t
  misc_feature (1086)..(1086): n is a, c, g, or t
  misc_feature (1089)..(1089): n is a, c, g, or t
  misc_feature (1103)..(1104): n is a, c, g, or t
  misc_feature (1112)..(1112): n is a, c, g, or t
  misc_feature (1120)..(1121): n is a, c, g, or t
  misc_feature (1123)..(1123): n is a, c, g, or t
  misc_feature (1126)..(1126): n is a, c, g, or t
  misc_feature (1130)..(1130): n is a, c, g, or t
  misc_feature (1143)..(1143): n is a, c, g, or t
  misc_feature (1146)..(1146): n is a, c, g, or t
  misc_feature (1151)..(1151): n is a, c, g, or t
  misc_feature (1156)..(1156): n is a, c, g, or t
  misc_feature (1162)..(1163): n is a, c, g, or t
  misc_feature (1168)..(1168): n is a, c, g, or t
  misc_feature (1176)..(1176): n is a, c, g, or t
  misc_feature (1181)..(1181): n is a, c, g, or t
  misc_feature (1184)..(1184): n is a, c, g, or t
  misc_feature (1192)..(1192): n is a, c, g, or t
  misc_feature (1200)..(1200): n is a, c, g, or t
  misc_feature (1202)..(1202): n is a, c, g, or t
  misc_feature (1211)..(1211): n is a, c, g, or t
  misc_feature (1213)..(1213): n is a, c, g, or t
  misc_feature (1217)..(1217): n is a, c, g, or t
  misc_feature (1219)..(1219): n is a, c, g, or t
  misc_feature (1222)..(1222): n is a, c, g, or t
  misc_feature (1225)..(1226): n is a, c, g, or t
  misc_feature (1234)..(1234): n is a, c, g, or t
  misc_feature (1256)..(1256): n is a, c, g, or t
  misc_feature (1258)..(1260): n is a, c, g, or t
  misc_feature (1263)..(1263): n is a, c, g, or t
  misc_feature (1266)..(1267): n is a, c, g, or t
  misc_feature (1282)..(1282): n is a, c, g, or t
  misc_feature (1286)..(1287): n is a, c, g, or t
  misc_feature (1308)..(1308): n is a, c, g, or t
  misc_feature (1311)..(1311): n is a, c, g, or t
  misc_feature (1313)..(1314): n is a, c, g, or t
  misc_feature (1316)..(1316): n is a, c, g, or t
  misc_feature (1322)..(1322): n is a, c, g, or t
  misc_feature (1326)..(1326): n is a, c, g, or t
  misc_feature (1332)..(1332): n is a, c, g, or t
  misc_feature (1334)..(1334): n is a, c, g, or t
  misc_feature (1338)..(1338): n is a, c, g, or t
  misc_feature (1348)..(1350): n is a, c, g, or t
  misc_feature (1358)..(1358): n is a, c, g, or t
  misc_feature (1363)..(1363): n is a, c, g, or t
  misc_feature (1374)..(1374): n is a, c, g, or t
  misc_feature (1380)..(1380): n is a, c, g, or t
tagaggnaattactatggagaggatcgcatcaccatcaccatcacgggatcctatttaggtgacactatagaatcgtcgacccacgcgtccgctcttactgaacataagataattcatactggagagaaaccctacaaatgtgaagaatgtggcaaagcatttagccaatcctcaaccctaactagacatacgaggatgcacactggagagaaaccatacaaatgtgaagaatgtggcaaagcttttaatcgatcctcaaagcttactacacataagataattcatactggagagaaaccttacaagtgtgaagaatgtggcaaagcatttatatcatcctcaaccctaaatggacataagagaattcatactagagagaaaccctacaaatgtgaagaatgtggcaaagcatttagccaatcttcaaccctaactagacataagaggttgcacaccggagagaaaccctacaaatgtggagaatgtggcaaagcctttaaagagtcctcagctcttactaaacataagataattcacactggagagaaaccctacaaatgtgaaaaatgtggcaaagcctttaaccagtcttcaatccttactaaccataagaaaattcatactatcacacctgtaatcccagcactttgggaggccgaggcgggcggatcacgaggtcaggagatggagaccatcctggctaacacagtgaaaccccttctctactaaaaaatacaaaaaattagccgggcgtggtggcgggcgcctgtagtcccagctatgcgagaggctgangcagganaatggcgtgaacccgggaggcggagcttgcagtgagccgagatcacgccactgcactcaagcctgggcgacagagcgagactccgtctcaaaaaaaaaaaaaagaaaattcctactagagagaacccntacaaatataaagaatgnggcaaatcnttttancgggncttcnacctttnctnaacataaggnaattcntacnggaattaaactctanaatnnggaaaaagggggcaancctttttncgggccccccccctacccganntaaaaaaatncttccnggncagcaccctacaanngggaaaanttggcaanncnttnaccngttttcccccttnctncgaanaaaanaccccnntgggnaaaaaacnttaanggngggaaaangggggaangncttaaaaancnggantnttnaannaaataaantttttctttggggggaaaaccncnnnccnggnnaggggcccccctttnaaannaaattttttaaacaaaaaaanggngnngnaacccnaaanggggangnggcnccccccgggnnncccttttnggggnaaatttcgggnaaaccngg

SEQ ID NO: 35 - DNA, 256 bp, Homo Sapiens
  misc_feature (16)..(16): n is a, c, g, or t
  misc_feature (18)..(18): n is a, c, g, or t
  misc_feature (22)..(22): n is a, c, g, or t
  misc_feature (38)..(38): n is a, c, g, or t
  misc_feature (51)..(51): n is a, c, g, or t
  misc_feature (244)..(248): n is a, c, g, or t
ttattaagaggagatntnactntgagaggatcgatacntacatacggatcntatttaggtgacactatagaatcgtcgacccacgcgtccgcggaaagcgagcgtatctcccgagccgttgccactgacagccgcgggcgctcccatctgagtaagagccagcccgtccgcggcctctccagccccgggttcgcgctctcgactctcctgcctgcccagctgcgcggcggagcggagcgaggcnnnnnctgcgagt

SEQ ID NO: 36 - DNA, 1200 bp, Homo Sapiens
  misc_feature (129)..(129): n is a, c, g, or t
  misc_feature (171)..(171): n is a, c, g, or t
  misc_feature (227)..(227): n is a, c, g, or t
  misc_feature (277)..(277): n is a, c, g, or t
  misc_feature (289)..(289): n is a, c, g, or t
  misc_feature (442)..(442): n is a, c, g, or t
  misc_feature (468)..(468): n is a, c, g, or t
  misc_feature (645)..(645): n is a, c, g, or t
  misc_feature (665)..(665): n is a, c, g, or t
  misc_feature (672)..(672): n is a, c, g, or t
  misc_feature (714)..(714): n is a, c, g, or t
  misc_feature (835)..(835): n is a, c, g, or t
  misc_feature (887)..(887): n is a, c, g, or t
  misc_feature (946)..(946): n is a, c, g, or t
  misc_feature (955)..(955): n is a, c, g, or t
  misc_feature (960)..(960): n is a, c, g, or t
  misc_feature (1026)..(1026): n is a, c, g, or t
  misc_feature (1030)..(1030): n is a, c, g, or t
  misc_feature (1045)..(1045): n is a, c, g, or t
  misc_feature (1050)..(1050): n is a, c, g, or t
  misc_feature (1053)..(1053): n is a, c, g, or t
  misc_feature (1057)..(1057): n is a, c, g, or t
  misc_feature (1060)..(1060): n is a, c, g, or t
  misc_feature (1072)..(1072): n is a, c, g, or t
  misc_feature (1080)..(1081): n is a, c, g, or t
  misc_feature (1094)..(1094): n is a, c, g, or t
  misc_feature (1105)..(1105): n is a, c, g, or t
  misc_feature (1114)..(1114): n is a, c, g, or t
  misc_feature (1118)..(1118): n is a, c, g, or t
  misc_feature (1121)..(1121): n is a, c, g, or t
  misc_feature (1130)..(1131): n is a, c, g, or t
  misc_feature (1140)..(1140): n is a, c, g, or t
  misc_feature (1147)..(1147): n is a, c, g, or t
  misc_feature (1149)..(1149): n is a, c, g, or t
  misc_feature (1152)..(1154): n is a, c, g, or t
  misc_feature (1156)..(1156): n is a, c, g, or t
  misc_feature (1166)..(1168): n is a, c, g, or t
  misc_feature (1175)..(1175): n is a, c, g, or t
  misc_feature (1191)..(1191): n is a, c, g, or t
  misc_feature (1194)..(1195): n is a, c, g, or t
tagagaaattactatgagaggatcgcatcaccatcaccatcacggatcctatttaggtgacactatagaatcgtcgacccacgcgtccgcccacgcgtccgcccacgcggtccgcccacgcgctccggntgcagctcgggacttcggcctgacccagcccccatggcttcngaagagctacagaaagatctagaagaggtaaaggtgttgctggaaaaggctactangaaaagagtacgtgatgcccttacagctgaaaaatccaagattgagacanaaatcaagaacnagatgcaacagaaatcacagaagaaagcagaacttcttgataatgaaaaaccagctgctgtggttgctcccattacaacgggctatacggtgaaaatcagtaattatggatgggatcagtcagataagtttgtgaaaatctacattaccttanctggagttcatcaagttcccactganaatgtgcaggtgcatttcacagagaggtcatttgatcttttggtaaagaatctaaatgggaagagttactccatgattgtgaacaatctcttgaaacccatctctgtggaaggcagttcaaaaaaagtcaagactgatacagttcttatattgtgtagaaagaaagtggaaaacacnaggtgggattacctgacccnggttganaaggagtgcaaagaaaaagagaagccctcctatgacactgtnacagatcctagtgagggattgatgaatgttctaaagaaaatttatgaagatggagacgatgatatgaagcgaaccattaataaagcctgggtggaatcaagagagaagcacgccaaagganacacggaattttgagactttaaagtcgttttgggaactgtgatgtgatgtgnaatactgatgttttccagtaagggaatattggtgagctgcatatataaatttgacaganagctatttncctanccttctaagtaaggcaatgaattctcctttcctactggaggatttatttaataaaatatgcttatnaacnctcctgcaagaaggnttatnagnaccnggnccttttgttcangaaggttnnttgcttccccgtnaataaaaaacngtctgccanaaanccnacttggggnntttttttcnctaaatngnaannntngctggccttnnntacgccncccttccccaggaaantgnnaaccc

SEQ ID NO: 37 - DNA, 256 bp, Homo Sapiens
  misc_feature (4)..(4): n is a, c, g, or t
  misc_feature (12)..(12): n is a, c, g, or t
  misc_feature (18)..(18): n is a, c, g, or t
  misc_feature (253)..(253): n is a, c, g, or t
ttcnttaaagangagaanttactatgagaggatcgcatcaccatcaccatcacggatcctatttaggtgacactataaaatcgtcgacccacgcgtccgggcgggtccgcggcgcggtcggtcggcgcctgttctcgggctgtttggcggacgaagcttcacaaaagatgtctaagcaacagccaactcagtttataaatccagaaacacctggctatgttggatttgcaaacctccccaatcaagttcaccnttt

SEQ ID NO: 38 - DNA, 256 bp, Homo Sapiens
ccacgcgtccgacggggtcctggagcaccctgaagactcaagaccaaaagactgtcaggaaggcagagtgcagagcaatccactgtccaagaccacacgacttcgagaacggggaatactggccccggtctccctactacaatgtgagtgatgagatctctttccactgctatgacggttacactctccggggctctgccaatcgcacctgccaagtgaatggccggtggagtgggcagacagcgatctgtgacaa

SEQ ID NO: 39 - DNA, 1327 bp, Homo Sapiens
  misc_feature (746)..(746): n is a, c, g, or t
  misc_feature (847)..(847): n is a, c, g, or t
  misc_feature (864)..(864): n is a, c, g, or t
  misc_feature (884)..(884): n is a, c, g, or t
  misc_feature (894)..(894): n is a, c, g, or t
  misc_feature (913)..(913): n is a, c, g, or t
  misc_feature (930)..(930): n is a, c, g, or t
  misc_feature (946)..(946): n is a, c, g, or t
  misc_feature (948)..(948): n is a, c, g, or t
  misc_feature (969)..(969): n is a, c, g, or t
  misc_feature (983)..(983): n is a, c, g, or t
  misc_feature (997)..(997): n is a, c, g, or t
  misc_feature (1000)..(1000): n is a, c, g, or t
  misc_feature (1014)..(1014): n is a, c, g, or t
  misc_feature (1019)..(1019): n is a, c, g, or t
  misc_feature (1028)..(1028): n is a, c, g, or t
  misc_feature (1030)..(1030): n is a, c, g, or t
  misc_feature (1034)..(1034): n is a, c, g, or t
  misc_feature (1037)..(1037): n is a, c, g, or t
  misc_feature (1045)..(1045): n is a, c, g, or t
  misc_feature (1047)..(1047): n is a, c, g, or t
  misc_feature (1050)..(1050): n is a, c, g, or t
  misc_feature (1061)..(1061): n is a, c, g, or t
  misc_feature (1075)..(1075): n is a, c, g, or t
  misc_feature (1080)..(1080): n is a, c, g, or t
  misc_feature (1091)..(1091): n is a, c, g, or t
  misc_feature (1107)..(1107): n is a, c, g, or t
  misc_feature (1109)..(1109): n is a, c, g, or t
  misc_feature (1123)..(1123): n is a, c, g, or t
  misc_feature (1141)..(1141): n is a, c, g, or t
  misc_feature (1144)..(1144): n is a, c, g, or t
  misc_feature (1149)..(1149): n is a, c, g, or t
  misc_feature (1159)..(1160): n is a, c, g, or t
  misc_feature (1162)..(1162): n is a, c, g, or t
  misc_feature (1178)..(1178): n is a, c, g, or t
  misc_feature (1189)..(1189): n is a, c, g, or t
  misc_feature (1195)..(1195): n is a, c, g, or t
  misc_feature (1205)..(1205): n is a, c, g, or t
  misc_feature (1209)..(1209): n is a, c, g, or t
  misc_feature (1214)..(1214): n is a, c, g, or t
  misc_feature (1219)..(1219): n is a, c, g, or t
  misc_feature (1223)..(1223): n is a, c, g, or t
  misc_feature (1233)..(1233): n is a, c, g, or t
  misc_feature (1235)..(1235): n is a, c, g, or t
  misc_feature (1237)..(1237): n is a, c, g, or t
  misc_feature (1240)..(1240): n is a, c, g, or t
  misc_feature (1246)..(1248): n is a, c, g, or t
  misc_feature (1250)..(1250): n is a, c, g, or t
  misc_feature (1253)..(1254): n is a, c, g, or t
  misc_feature (1258)..(1259): n is a, c, g, or t
  misc_feature (1263)..(1266): n is a, c, g, or t
  misc_feature (1269)..(1270): n is a, c, g, or t
  misc_feature (1273)..(1275): n is a, c, g, or t
  misc_feature (1277)..(1277): n is a, c, g, or t
  misc_feature (1282)..(1286): n is a, c, g, or t
  misc_feature (1293)..(1293): n is a, c, g, or t
  misc_feature (1298)..(1300): n is a, c, g, or t
  misc_feature (1304)..(1304): n is a, c, g, or t
  misc_feature (1310)..(1311): n is a, c, g, or t
  misc_feature (1318)..(1318): n is a, c, g, or t
  misc_feature (1322)..(1323): n is a, c, g, or t
agaaattactatgagaggatcgcatcaccatcaccatcacggatcctatttaggtgacactatagaatcgtcgacccacgcgtccgttcctgcctctgccagaacggagggacctgtgaccctgtctcaggccactgtgcgtgcccagagggctgggccggcctggcctgtgagaaggagtgcctcccccgggacgtcagagctggctgccggcacagcggcggttgcctcaacgggggcctgtgtgacccgcacacgggccgctgcctctgcccagccggctggactggggacaagtgtcagagcccctgcctgcggggctggtttggagaggcctgtgcccagcgctgcagctgcccgcctggcgctgcctgccaccacgtcactggggcctgccgctgtccccctggcttcactggctccggctgcgagcagggatgtccgcccgggcggtatgggccaggctgtgaacagctgtgtgggtgtctcaacgggggctcctgtgatgcggccacgggggcctgccgctgccccactgggttcctcgggacggactgcaacctcacctgtccgcagggccgcttcggccccaactgcacccacgtgtgtgggtgtgggcagggggcggcctgcgaccctgtgaccggcacctgcctctgccccccggggagagccggcgtccgctgtgagcgaggctgcccccagaaccggtttggcgtgggctgcgagcacacctgctcctgcanaaatgggggcctgtgccacgccagcaacggcagctgctcctgtggcctgggctggacggggcggcactgcgagctggcctgtccccctgggcgctacgganccgcctgcaatctggantgctcctgccacaacaacancacgtgtgancctgcaacgggcacctgcngctgcggccccggcttntatggcaaggcctgcnancaccctgtcccctggcttcanggggctgctgccanggttttgctgttgnaanatgaaccccctgcnacccnataatggcnangctntgncctgcggntncanggcaatttggnaaaagggttgaacnagttnatttgaaaagnttccccaaccctttantntaaaggggggcacntggaacctttaacggttnttnctttnccccaagggnntnaaaaaccttttaactntaattaaaaanggccantttggccccnttcnccccnatttnaatncggggggggntnanatnaacctnnntnggnnattnntttnnnnaannaannngnccccnnnnnaaaaggnccctnnncccnaaaaanntttttangggnngggg

SEQ ID NO: 40 - DNA, 1357 bp, Homo Sapiens
  misc_feature (472)..(472): n is a, c, g, or t
  misc_feature (476)..(476): n is a, c, g, or t
  misc_feature (481)..(481): n is a, c, g, or t
  misc_feature (483)..(483): n is a, c, g, or t
  misc_feature (492)..(492): n is a, c, g, or t
  misc_feature (494)..(494): n is a, c, g, or t
  misc_feature (498)..(498): n is a, c, g, or t
  misc_feature (519)..(519): n is a, c, g, or t
  misc_feature (527)..(527): n is a, c, g, or t
  misc_feature (538)..(538): n is a, c, g, or t
  misc_feature (543)..(543): n is a, c, g, or t
  misc_feature (553)..(553): n is a, c, g, or t
  misc_feature (555)..(556): n is a, c, g, or t
  misc_feature (560)..(560): n is a, c, g, or t
  misc_feature (563)..(563): n is a, c, g, or t
  misc_feature (582)..(582): n is a, c, g, or t
  misc_feature (584)..(584): n is a, c, g, or t
  misc_feature (593)..(593): n is a, c, g, or t
  misc_feature (607)..(607): n is a, c, g, or t
  misc_feature (612)..(612): n is a, c, g, or t
  misc_feature (615)..(615): n is a, c, g, or t
  misc_feature (667)..(667): n is a, c, g, or t
  misc_feature (689)..(689): n is a, c, g, or t
  misc_feature (700)..(700): n is a, c, g, or t
  misc_feature (742)..(742): n is a, c, g, or t
  misc_feature (750)..(750): n is a, c, g, or t
  misc_feature (754)..(754): n is a, c, g, or t
  misc_feature (787)..(787): n is a, c, g, or t
  misc_feature (817)..(817): n is a, c, g, or t
  misc_feature (855)..(855): n is a, c, g, or t
  misc_feature (861)..(861): n is a, c, g, or t
  misc_feature (868)..(868): n is a, c, g, or t
  misc_feature (874)..(874): n is a, c, g, or t
  misc_feature (902)..(902): n is a, c, g, or t
  misc_feature (905)..(905): n is a, c, g, or t
  misc_feature (920)..(920): n is a, c, g, or t
  misc_feature (925)..(925): n is a, c, g, or t
  misc_feature (936)..(936): n is a, c, g, or t
  misc_feature (942)..(943): n is a, c, g, or t
  misc_feature (955)..(955): n is a, c, g, or t
  misc_feature (979)..(979): n is a, c, g, or t
  misc_feature (984)..(984): n is a, c, g, or t
  misc_feature (989)..(990): n is a, c, g, or t
  misc_feature (1004)..(1004): n is a, c, g, or t
  misc_feature (1006)..(1006): n is a, c, g, or t
  misc_feature (1010)..(1010): n is a, c, g, or t
  misc_feature (1012)..(1012): n is a, c, g, or t
  misc_feature (1016)..(1016): n is a, c, g, or t
  misc_feature (1021)..(1021): n is a, c, g, or t
  misc_feature (1024)..(1024): n is a, c, g, or t
  misc_feature (1027)..(1027): n is a, c, g, or t
  misc_feature (1032)..(1032): n is a, c, g, or t
  misc_feature (1035)..(1035): n is a, c, g, or t
  misc_feature (1066)..(1066): n is a, c, g, or t
  misc_feature (1073)..(1073): n is a, c, g, or t
  misc_feature (1080)..(1081): n is a, c, g, or t
  misc_feature (1084)..(1084): n is a, c, g, or t
  misc_feature (1087)..(1087): n is a, c, g, or t
  misc_feature (1093)..(1093): n is a, c, g, or t
  misc_feature (1097)..(1098): n is a, c, g, or t
  misc_feature (1101)..(1101): n is a, c, g, or t
  misc_feature (1132)..(1132): n is a, c, g, or t
  misc_feature (1134)..(1134): n is a, c, g, or t
  misc_feature (1143)..(1143): n is a, c, g, or t
  misc_feature (1146)..(1146): n is a, c, g, or t
  misc_feature (1164)..(1164): n is a, c, g, or t
  misc_feature (1169)..(1170): n is a, c, g, or t
  misc_feature (1176)..(1177): n is a, c, g, or t
  misc_feature (1184)..(1184): n is a, c, g, or t
  misc_feature (1186)..(1186): n is a, c, g, or t
  misc_feature (1193)..(1193): n is a, c, g, or t
  misc_feature (1197)..(1197): n is a, c, g, or t
  misc_feature (1205)..(1205): n is a, c, g, or t
  misc_feature (1220)..(1220): n is a, c, g, or t
  misc_feature (1225)..(1225): n is a, c, g, or t
  misc_feature (1236)..(1236): n is a, c, g, or t
  misc_feature (1242)..(1242): n is a, c, g, or t
  misc_feature (1246)..(1246): n is a, c, g, or t
  misc_feature (1251)..(1252): n is a, c, g, or t
  misc_feature (1256)..(1256): n is a, c, g, or t
  misc_feature (1258)..(1258): n is a, c, g, or t
  misc_feature (1261)..(1261): n is a, c, g, or t
  misc_feature (1265)..(1266): n is a, c, g, or t
  misc_feature (1268)..(1268): n is a, c, g, or t
  misc_feature (1271)..(1271): n is a, c, g, or t
  misc_feature (1278)..(1278): n is a, c, g, or t
  misc_feature (1281)..(1282): n is a, c, g, or t
  misc_feature (1286)..(1288): n is a, c, g, or t
  misc_feature (1291)..(1291): n is a, c, g, or t
  misc_feature (1293)..(1293): n is a, c, g, or t
  misc_feature (1298)..(1298): n is a, c, g, or t
  misc_feature (1304)..(1304): n is a, c, g, or t
  misc_feature (1310)..(1310): n is a, c, g, or t
  misc_feature (1315)..(1315): n is a, c, g, or t
  misc_feature (1322)..(1329): n is a, c, g, or t
  misc_feature (1334)..(1336): n is a, c, g, or t
  misc_feature (1341)..(1344): n is a, c, g, or t
  misc_feature (1348)..(1348): n is a, c, g, or t
  misc_feature (1350)..(1350): n is a, c, g, or t
  misc_feature (1354)..(1354): n is a, c, g, or t
  misc_feature (1357)..(1357): n is a, c, g, or t
tagagaaattactatgagaggatcgcatcaccatcaccatcacggatcctatttaggtgacactatagaatcgtcgacccacgcgtccgaaatcatgacccgagaggtgcagacaaatgacttgaaagaagtggtcaataaattgattccagacagcattggaaaagacatagaaaaggcttgccaatctatttatcctctccatgatgtcttcgttagaaaagtaaaaatgctgaagaagcccaagtttgaattgggaaagctcatggagcttcatggtgaaggcagtagttctggaaaagccactggggacgagacaggtgctaaagttgaacgagctgatggatatgaaccaccagtccaagaatctgtttaaagttcagacttcaaatagtggcaaataaaaagtgctatttgtgaaaaaaaaaaaaaaaaaaaaaaaaaaaaaaaaaaaaaaaaaaaaaaaaaaaangggnggccncnccctatagngngtcntattaagcttaattagctgancttggacncctgttgatanatccngtaatgaccncnnaacnccntctggatttgttcaaaacncncggttgccnccgggcgttttttnttggnganaatccaagctagcttggcgagattttcaggagctaaggaagctaaaatgganaaaaaaatccctggatataccnccgttgatatntcccaatggcatcgtaaagaacattttgaggcatttcagtcngttgctcnatgnacctataaccagaccgttcagctggatattacngcctttttaaagaccgtaaagaaaaataancccaagttttatccggccttttttcccattcttgcccncctgangaatgcncctccnggaatttcctatggcaatgaaaaacggngancctggggatatgggnaaaanggtcccccccntgttanncccgtttttccntgaaccaaactggaaacgtttttncctcnccccnnggagggaaaacccncnaacnantttnccggnggnttnccacnccntaattttcccccaaaaatgggggcggggttnccggggnaaaaccnnggnccntatttncccnnaanggggtttttttgggaaaaaatttttttttcncnccccccccnaancccccgggggggaatttnccccnntttttnnatttaancnggggccnaaangggaaaantttctcccccccccnttttncccccgggggnaaaatnttanccccnnggcnanaangggnntnaanccccccnggnnaatnnnggntnccccnggcccntttggnggggnctccccnnnnnnnnaaaannnttttnnnntttncncccnccn

SEQ ID NO: 41 - DNA, 1383 bp, Homo Sapiens
  misc_feature (1)..(1): n is a, c, g, or t
  misc_feature (862)..(862): n is a, c, g, or t
  misc_feature (902)..(902): n is a, c, g, or t
  misc_feature (915)..(915): n is a, c, g, or t
  misc_feature (954)..(954): n is a, c, g, or t
  misc_feature (959)..(959): n is a, c, g, or t
  misc_feature (964)..(964): n is a, c, g, or t
  misc_feature (983)..(983): n is a, c, g, or t
  misc_feature (993)..(994): n is a, c, g, or t
  misc_feature (999)..(999): n is a, c, g, or t
  misc_feature (1002)..(1002): n is a, c, g, or t
  misc_feature (1013)..(1013): n is a, c, g, or t
  misc_feature (1028)..(1028): n is a, c, g, or t
  misc_feature (1032)..(1032): n is a, c, g, or t
  misc_feature (1038)..(1038): n is a, c, g, or t
  misc_feature (1040)..(1040): n is a, c, g, or t
  misc_feature (1049)..(1049): n is a, c, g, or t
  misc_feature (1053)..(1053): n is a, c, g, or t
  misc_feature (1055)..(1056): n is a, c, g, or t
  misc_feature (1058)..(1058): n is a, c, g, or t
  misc_feature (1067)..(1067): n is a, c, g, or t
  misc_feature (1069)..(1069): n is a, c, g, or t
  misc_feature (1072)..(1072): n is a, c, g, or t
  misc_feature (1075)..(1075): n is a, c, g, or t
  misc_feature (1080)..(1082): n is a, c, g, or t
  misc_feature (1084)..(1084): n is a, c, g, or t
  misc_feature (1086)..(1087): n is a, c, g, or t
  misc_feature (1090)..(1090): n is a, c, g, or t
  misc_feature (1100)..(1100): n is a, c, g, or t
  misc_feature (1108)..(1109): n is a, c, g, or t
  misc_feature (1112)..(1112): n is a, c, g, or t
  misc_feature (1116)..(1117): n is a, c, g, or t
  misc_feature (1127)..(1128): n is a, c, g, or t
  misc_feature (1135)..(1135): n is a, c, g, or t
  misc_feature (1143)..(1143): n is a, c, g, or t
  misc_feature (1151)..(1151): n is a, c, g, or t
  misc_feature (1155)..(1155): n is a, c, g, or t
  misc_feature (1162)..(1164): n is a, c, g, or t
  misc_feature (1174)..(1175): n is a, c, g, or t
  misc_feature (1182)..(1182): n is a, c, g, or t
  misc_feature (1184)..(1184): n is a, c, g, or t
  misc_feature (1188)..(1188): n is a, c, g, or t
  misc_feature (1190)..(1190): n is a, c, g, or t
  misc_feature (1192)..(1192): n is a, c, g, or t
  misc_feature (1197)..(1197): n is a, c, g, or t
  misc_feature (1199)..(1199): n is a, c, g, or t
  misc_feature (1209)..(1209): n is a, c, g, or t
  misc_feature (1212)..(1212): n is a, c, g, or t
  misc_feature (1214)..(1214): n is a, c, g, or t
  misc_feature (1216)..(1216): n is a, c, g, or t
  misc_feature (1218)..(1218): n is a, c, g, or t
  misc_feature (1224)..(1224): n is a, c, g, or t
  misc_feature (1228)..(1229): n is a, c, g, or t
  misc_feature (1233)..(1234): n is a, c, g, or t
  misc_feature (1238)..(1238): n is a, c, g, or t
  misc_feature (1245)..(1245): n is a, c, g, or t
  misc_feature (1253)..(1254): n is a, c, g, or t
  misc_feature (1256)..(1256): n is a, c, g, or t
  misc_feature (1260)..(1260): n is a, c, g, or t
  misc_feature (1262)..(1262): n is a, c, g, or t
  misc_feature (1266)..(1268): n is a, c, g, or t
  misc_feature (1272)..(1280): n is a, c, g, or t
  misc_feature (1282)..(1282): n is a, c, g, or t
  misc_feature (1284)..(1284): n is a, c, g, or t
  misc_feature (1290)..(1292): n is a, c, g, or t
  misc_feature (1296)..(1299): n is a, c, g, or t
  misc_feature (1306)..(1306): n is a, c, g, or t
  misc_feature (1311)..(1313): n is a, c, g, or t
  misc_feature (1316)..(1316): n is a, c, g, or t
  misc_feature (1319)..(1321): n is a, c, g, or t
  misc_feature (1326)..(1327): n is a, c, g, or t
  misc_feature (1331)..(1332): n is a, c, g, or t
  misc_feature (1345)..(1345): n is a, c, g, or t
  misc_feature (1350)..(1351): n is a, c, g, or t
  misc_feature (1359)..(1360): n is a, c, g, or t
  misc_feature (1364)..(1366): n is a, c, g, or t
  misc_feature (1368)..(1374): n is a, c, g, or t
  misc_feature (1376)..(1383): n is a, c, g, or t
naatagagaaattactatgagaggatcgcatcaccatcaccatcacggatcctatttaggtgacactatagaatcgtcgacccacgcgtccgggaagagcatgtctggggccagccccaaagagtcaactaatccagagaaggcccatgagactcttcatcagtctttatccctggcatcttcccccaaaggaaccattgagaacattttggacaatgacccaagggaccttataggagacttctccaagggttatctctttcatacagttgctgggaaacatcaggatttaaaatacatctctccagaaattatggcatctgttttgaatggcaagtttgccaacctcattaaagagtttgttatcatcgactgtcgatacccatatgaatacgagggaggccacatcaagggtgcagtgaacttgcacatggaagaagaggttgaagacttcttattgaagaagcccattgtacctactgatggcaagcgtgtcattgttgtgtttcactgcgagttttcttctgagagaggtccccgcatgtgccggtatgtgagagagagagatcgcctgggtaatgaataccccaaactccactaccctgagctgtatgtcctgaaggggggatacaaggagttctttatgaaatgccagtcttactgtgagccccctagctaccggcccatgcaccacgaggactttaaagaagacctgaagaagttccgcaccaagagccggacctgggcaggggagaagagcaagagggagatgtacagtcgtctgaagaagctctgagggcggcaggaccagccagcagcagcccaagcttccctccatccccctttaccctctttgctgcanagaaacttaagcaaaggggacagctgtgtgacatttgganagggggcctgggnacttccatgccttaaacctacctcccacactcccaaggntggancccangggcatcttgctggctacncctcttctgnncctgntanacgtcctccgnccatatcaaaactgngccncaatgnanttctgaacnccgngnnangctgctctnanccnagngggannnancnnccngggccttttngggctccnnccnttcnngaggggaaannaaacggnggggaatnaaaaattncccnaaatgcnnntggccaaaannaaaaaancngggnangnaaggncnttggggaaanccnangntnattttncccnncccnncccnttttttntttttttnnancccngnaaannntttnnnnnnnnnangngaaaannncccnnnnggggggnttttnnnccnggnnnccccnntttnnttaaaaaaaaaanggggnncccccccnngggnnnannnnnnntnnnnnnnn

SEQ ID NO: 42 - DNA, 256 bp, Homo Sapiens
  misc_feature (19)..(19): n is a, c, g, or t
  misc_feature (23)..(23): n is a, c, g, or t
ttattaaagaggagaaatnactntgagaggatcgcatcaccatcaccatcacggatcctatttaggtgacactatagaatcgtcgacccacgcgtccgatcgtattacacctgaggaggccaagtacaagttgtgcaaagtgagaaagatctttgtgggcacaaaaggaatccctcatctggtgactcatgatgcccgcaccatccgctaccccgatcccctcatcaaggtgaatgataccatttcagattgattt

SEQ ID NO: 43 - DNA, 1286 bp, Homo Sapiens
  misc_feature (514)..(514): n is a, c, g, or t
  misc_feature (771)..(771): n is a, c, g, or t
  misc_feature (791)..(791): n is a, c, g, or t
  misc_feature (826)..(826): n is a, c, g, or t
  misc_feature (838)..(838): n is a, c, g, or t
  misc_feature (841)..(841): n is a, c, g, or t
  misc_feature (850)..(850): n is a, c, g, or t
  misc_feature (854)..(854): n is a, c, g, or t
  misc_feature (857)..(857): n is a, c, g, or t
  misc_feature (863)..(863): n is a, c, g, or t
  misc_feature (877)..(877): n is a, c, g, or t
  misc_feature (915)..(915): n is a, c, g, or t
  misc_feature (918)..(918): n is a, c, g, or t
  misc_feature (936)..(936): n is a, c, g, or t
  misc_feature (947)..(947): n is a, c, g, or t
  misc_feature (951)..(951): n is a, c, g, or t
  misc_feature (958)..(958): n is a, c, g, or t
  misc_feature (960)..(960): n is a, c, g, or t
  misc_feature (963)..(963): n is a, c, g, or t
  misc_feature (965)..(966): n is a, c, g, or t
  misc_feature (970)..(970): n is a, c, g, or t
  misc_feature (972)..(973): n is a, c, g, or t
  misc_feature (979)..(979): n is a, c, g, or t
  misc_feature (991)..(991): n is a, c, g, or t
  misc_feature (1009)..(1009): n is a, c, g, or t
  misc_feature (1016)..(1016): n is a, c, g, or t
  misc_feature (1030)..(1030): n is a, c, g, or t
  misc_feature (1035)..(1035): n is a, c, g, or t
  misc_feature (1037)..(1037): n is a, c, g, or t
  misc_feature (1041)..(1042): n is a, c, g, or t
  misc_feature (1045)..(1045): n is a, c, g, or t
  misc_feature (1047)..(1047): n is a, c, g, or t
  misc_feature (1054)..(1054): n is a, c, g, or t
  misc_feature (1056)..(1056): n is a, c, g, or t
  misc_feature (1063)..(1063): n is a, c, g, or t
  misc_feature (1075)..(1075): n is a, c, g, or t
  misc_feature (1079)..(1079): n is a, c, g, or t
  misc_feature (1084)..(1085): n is a, c, g, or t
  misc_feature (1093)..(1094): n is a, c, g, or t
  misc_feature (1100)..(1100): n is a, c, g, or t
  misc_feature (1102)..(1104): n is a, c, g, or t
  misc_feature (1109)..(1109): n is a, c, g, or t
  misc_feature (1111)..(1112): n is a, c, g, or t
  misc_feature (1115)..(1115): n is a, c, g, or t
  misc_feature (1119)..(1120): n is a, c, g, or t
  misc_feature (1124)..(1125): n is a, c, g, or t
  misc_feature (1130)..(1130): n is a, c, g, or t
  misc_feature (1134)..(1135): n is a, c, g, or t
  misc_feature (1142)..(1143): n is a, c, g, or t
  misc_feature (1149)..(1149): n is a, c, g, or t
  misc_feature (1151)..(1154): n is a, c, g, or t
  misc_feature (1157)..(1157): n is a, c, g, or t
  misc_feature (1160)..(1160): n is a, c, g, or t
  misc_feature (1163)..(1165): n is a, c, g, or t
  misc_feature (1168)..(1168): n is a, c, g, or t
  misc_feature (1172)..(1173): n is a, c, g, or t
  misc_feature (1181)..(1184): n is a, c, g, or t
  misc_feature (1186)..(1186): n is a, c, g, or t
  misc_feature (1190)..(1191): n is a, c, g, or t
  misc_feature (1195)..(1199): n is a, c, g, or t
  misc_feature (1201)..(1201): n is a, c, g, or t
  misc_feature (1208)..(1208): n is a, c, g, or t
  misc_feature (1212)..(1212): n is a, c, g, or t
  misc_feature (1216)..(1217): n is a, c, g, or t
  misc_feature (1222)..(1222): n is a, c, g, or t
  misc_feature (1224)..(1224): n is a, c, g, or t
  misc_feature (1230)..(1230): n is a, c, g, or t
  misc_feature (1233)..(1237): n is a, c, g, or t
  misc_feature (1239)..(1241): n is a, c, g, or t
  misc_feature (1246)..(1247): n is a, c, g, or t
  misc_feature (1250)..(1252): n is a, c, g, or t
  misc_feature (1256)..(1256): n is a, c, g, or t
  misc_feature (1262)..(1262): n is a, c, g, or t
  misc_feature (1273)..(1279): n is a, c, g, or t
aattagagaaattactatgagaggatcgcatcaccatcaccatcacggatcctatttaggtgacactatagaatcgtcgacccacgcgtccgcccacgcgtccgccgagccgagcgcgcggagcagctggggccggggcgcggatgctggaagttcacatcccgtcggtggggcccgaggccgaggggcccaggcagagcccggagaaaagccacatggtgttccgagtggaggtgctgtgcagcgggcgcagacacacggtgccaaggcgctacagcgagttccacgcgctgcacaagcgggtgaggcggcgccgacctcccaccggccccggcccagcctctgtccagcccccgcccaggccctgtgaggcgggcgggcgagccccagcctccgccacccccattactgcctcagtccctgcgcagccggtcagcccccgggcctctgtgggtgggttggggccttcctcgccctcggccggtccaccactcaccagggtctgtcccagtanagcccgaaggcgggggcgcgggagggcttctggctggggcgaagagggcttgagggctcagtcgggatgctgtgatcgcacgcggtaaacctccagtagatcaagaagctgtacaaagtgcccgacttcccctcgaaacgcctgcccaactggaggaccagagggttggaacagcgccggcagggcttggaggcttacatccagggcatcctgtacctgaaccaggaggtgcccaaggagttactggaattcctganacttcggcacttccccacanaccccaaggctagcaactggggcaccctgaggganttcctgcctggnganagcaagctnccancancaccancggcctgtcctgancttcatgtggatccctatgtttgaacccctcccaaaantcnctgccaaagtggtgggtnaaatggtgtgnttcnagggccntntananntttnannattcancccaaaaaaaancccaaccaaaaggggggncttgttncccttgttcctttngccancnaatnnccntngattaantncaaaaanggcctttttggnttgnctccnnaaaaaaannatgggncnnnttttncnnatnaaannccannaaaangggnngggtccnncttttngnnnnggnaanccnnnaantttnnttttcccnnnngncccnntttnnnnncnaattttncccntttnnagggntnaaaaanttnnnnntnnnatttnnaannngganaggggnaaaaatttttnnnnnnntttaaaa

SEQ ID NO: 44 - DNA, 256 bp, Homo Sapiens
agcaccactccttctgggtgggcgacgtggtccgggtcatcggcgaccttgacacagtgaagcggctgcaggctgggcatggcgagtggacggacgacatggcccctgccctgggccgcgtcgggaaggtggtgaaagtgtttggagacgggaacctgcgtgtagcagtcgctggtcagcggtggaccttcagcccctcctgcctggtggcctaccggcccgaggaggatgccaacctggacgtggccgagcgcgc

SEQ ID NO: 45 - DNA, 256 bp, Homo Sapiens
  misc_feature (4)..(4): n is a, c, g, or t
taanaggagaattaactatgagaggatcgcatcaccatcaccatcacggatcctatttaggtgacactatagaatcgtcgacccacgcgtccgcccacgcgtccgcccacgcgtccgctttccgcgccgccacaatggtgcgcatgaatgtcctggcagatgctctcaagagtatcaacaatgccgaaaagagaggcaaacgccaggtgcttattaggccgtgctccaaagtcatcgtccggtttctcactgtgat

SEQ ID NO: 46 - DNA, 256 bp, Homo Sapiens
ggctccgggcggcagctatgaggcgggacgtgcgcatcctgttactgggcgaggcccaggtggggaagacgtcgctgatcctgtccctggtgggcgaggagttccccgaggaggtccctccccgcgcggaggagatcacgatccccgcggacgtcaccccggagaaggtgcccacccacatcgtggactactcagaagccgagcagacggacgaggagctgcgggaggagatccacaaggcaaacgtggtgtgtgt

SEQ ID NO: 47 - DNA, 256 bp, Homo Sapiens
  misc_feature (2)..(2): n is a, c, g, or t
  misc_feature (10)..(10): n is a, c, g, or t
  misc_feature (13)..(13): n is a, c, g, or t
  misc_feature (27)..(27): n is a, c, g, or t
  misc_feature (38)..(38): n is a, c, g, or t
  misc_feature (44)..(44): n is a, c, g, or t
  misc_feature (50)..(50): n is a, c, g, or t
  misc_feature (56)..(57): n is a, c, g, or t
  misc_feature (67)..(67): n is a, c, g, or t
  misc_feature (73)..(73): n is a, c, g, or t
  misc_feature (79)..(79): n is a, c, g, or t
  misc_feature (89)..(89): n is a, c, g, or t
  misc_feature (93)..(93): n is a, c, g, or t
  misc_feature (98)..(98): n is a, c, g, or t
  misc_feature (100)..(100): n is a, c, g, or t
  misc_feature (152)..(152): n is a, c, g, or t
  misc_feature (165)..(166): n is a, c, g, or t
  misc_feature (177)..(177): n is a, c, g, or t
tngcaaaatngancctaaaaccccaanttgtggggccnaaaaantatttntgaagnngtttcgcatnaccatnaccatncacggtttcntatntaggngncactatagaaaagtcgacccacgcgtccgagaagattaaggaaaagtacatngatcaagaagagnncaacaaaacanagcccatctggaccagaaatcccgacgatattactaatgaggagtacggagaattctataagagcttgaccaatgactg

SEQ ID NO: 48 - DNA, 1231 bp, Homo Sapiens
  misc_feature (902)..(902): n is a, c, g, or t
  misc_feature (962)..(962): n is a, c, g, or t
  misc_feature (972)..(972): n is a, c, g, or t
  misc_feature (993)..(993): n is a, c, g, or t
  misc_feature (996)..(996): n is a, c, g, or t
  misc_feature (1000)..(1000): n is a, c, g, or t
  misc_feature (1002)..(1002): n is a, c, g, or t
  misc_feature (1027)..(1028): n is a, c, g, or t
  misc_feature (1036)..(1036): n is a, c, g, or t
  misc_feature (1066)..(1066): n is a, c, g, or t
  misc_feature (1085)..(1085): n is a, c, g, or t
  misc_feature (1120)..(1120): n is a, c, g, or t
  misc_feature (1123)..(1123): n is a, c, g, or t
  misc_feature (1125)..(1125): n is a, c, g, or t
  misc_feature (1128)..(1128): n is a, c, g, or t
  misc_feature (1131)..(1131): n is a, c, g, or t
  misc_feature (1133)..(1133): n is a, c, g, or t
  misc_feature (1142)..(1142): n is a, c, g, or t
  misc_feature (1153)..(1153): n is a, c, g, or t
  misc_feature (1156)..(1157): n is a, c, g, or t
  misc_feature (1163)..(1163): n is a, c, g, or t
  misc_feature (1166)..(1166): n is a, c, g, or t
  misc_feature (1168)..(1168): n is a, c, g, or t
  misc_feature (1171)..(1172): n is a, c, g, or t
  misc_feature (1175)..(1175): n is a, c, g, or t
  misc_feature (1180)..(1180): n is a, c, g, or t
  misc_feature (1187)..(1187): n is a, c, g, or t
  misc_feature (1190)..(1190): n is a, c, g, or t
  misc_feature (1192)..(1192): n is a, c, g, or t
  misc_feature (1199)..(1199): n is a, c, g, or t
  misc_feature (1208)..(1208): n is a, c, g, or t
  misc_feature (1214)..(1214): n is a, c, g, or t
tagagaaattactatgagaggatcgcatcaccatcaccatcacggatcctatttaggtgacactatagaatcgtcgacccacgcgtccgcttcgcggctgctcaagatgaaccgactcttcgggaaagcgaaacccaaggctccgccgcccagcctgactgactgcattggcacggtggacagtagagcagaatccattgacaagaagatttctcgattggatgctgagctagtgaagtataaggatcagatcaagaagatgagagagggtcctgcaaagaatatggtcaagcagaaagccttgcgagttttaaagcaaaagaggatgtatgagcagcagcgggacaatcttgcccaacagtcattcaacatggaacaagccaattataccatccagtctttgaaggacaccaagaccacggttgatgctatgaaactgggagtaaaggaaatgaagaaggcatacaagcaagtgaagatcgaccagattgaggatttacaagaccagctagaggatatgatggaagatgcaaatgaaatccaagaagcactgagtcgcagttatggcaccccagaactggatgaagatgatttagaagcagagttggatgcactaggtgatgagcttctggctgatgaagacagttcttatttggatgaggcagcatctgcacctgcaattccagaaggtgttcccactgatacaaaaaacaaggatggagttctggtggatgaatttggattgccacagatccctgcttcatagatttgcatcattcaagcatatcttgtaaaacaaacacatattatgggactaggaaatatttatctttcccaatttgccataacagattttaggtttcttccctttctttgaagggaaagtttaattacattgctcnttttatttttttccattaagagactcattgcttgggaaaatgctttcctccgtactaaantttgattccntttttttcttatgaaaaaacnganctcngntttaaaagtatttttagcctcgganngacttggntttcctttcctttaaaaaaatttggaaatnaaacctaagggaatgggantctttaaaaaaaaaaaaaaaaaaaaaaaaaagggnggncnccnccntnaggggggcntattaaccttnttnnctgacntgnanccnngtngaaanatcccgnaangnccccaanccccttggntttttncaaaccctggtgccccc

SEQ ID NO: 49 - DNA, 1200 bp, Homo Sapiens
  misc_feature (852)..(852): n is a, c, g, or t
  misc_feature (855)..(855): n is a, c, g, or t
  misc_feature (885)..(885): n is a, c, g, or t
  misc_feature (899)..(899): n is a, c, g, or t
  misc_feature (941)..(941): n is a, c, g, or t
  misc_feature (943)..(943): n is a, c, g, or t
  misc_feature (950)..(950): n is a, c, g, or t
  misc_feature (958)..(958): n is a, c, g, or t
  misc_feature (964)..(964): n is a, c, g, or t
  misc_feature (966)..(966): n is a, c, g, or t
  misc_feature (969)..(969): n is a, c, g, or t
  misc_feature (972)..(972): n is a, c, g, or t
  misc_feature (974)..(974): n is a, c, g, or t
  misc_feature (993)..(993): n is a, c, g, or t
  misc_feature (997)..(997): n is a, c, g, or t
  misc_feature (1002)..(1002): n is a, c, g, or t
  misc_feature (1007)..(1007): n is a, c, g, or t
  misc_feature (1010)..(1010): n is a, c, g, or t
  misc_feature (1013)..(1013): n is a, c, g, or t
  misc_feature (1015)..(1015): n is a, c, g, or t
  misc_feature (1026)..(1026): n is a, c, g, or t
  misc_feature (1033)..(1033): n is a, c, g, or t
  misc_feature (1047)..(1047): n is a, c, g, or t
  misc_feature (1058)..(1058): n is a, c, g, or t
  misc_feature (1061)..(1061): n is a, c, g, or t
  misc_feature (1070)..(1070): n is a, c, g, or t
  misc_feature (1073)..(1073): n is a, c, g, or t
  misc_feature (1076)..(1076): n is a, c, g, or t
  misc_feature (1081)..(1081): n is a, c, g, or t
  misc_feature (1084)..(1084): n is a, c, g, or t
  misc_feature (1089)..(1089): n is a, c, g, or t
  misc_feature (1091)..(1091): n is a, c, g, or t
  misc_feature (1097)..(1098): n is a, c, g, or t
  misc_feature (1113)..(1113): n is a, c, g, or t
  misc_feature (1117)..(1117): n is a, c, g, or t
  misc_feature (1121)..(1121): n is a, c, g, or t
  misc_feature (1132)..(1132): n is a, c, g, or t
  misc_feature (1135)..(1135): n is a, c, g, or t
  misc_feature (1147)..(1147): n is a, c, g, or t
  misc_feature (1153)..(1153): n is a, c, g, or t
  misc_feature (1156)..(1160): n is a, c, g, or t
  misc_feature (1167)..(1167): n is a, c, g, or t
  misc_feature (1170)..(1170): n is a, c, g, or t
  misc_feature (1172)..(1172): n is a, c, g, or t
  misc_feature (1174)..(1174): n is a, c, g, or t
  misc_feature (1179)..(1179): n is a, c, g, or t
  misc_feature (1187)..(1187): n is a, c, g, or t
  misc_feature (1189)..(1190): n is a, c, g, or t
  misc_feature (1196)..(1197): n is a, c, g, or t
agagagaattactatgagaggatcgcatcaccatcaccatcacggatcctatttaggtgacactatagaatcgtcgacccacgcgtccgagagccgccagcgcgtgcgctacgactcctccaaccaggtcaagggcaagcccgacctgaacacggcgctgcccgtgcgccagacggcgtccatcttcaagcagccggtgaccaagattaccaaccaccccagcaacaaggtcaagagcgacccgcagaaggcggtggaccagccgcgccagctcttctgggagaagaagctgagcggcctgaacgccttcgacattgctgaggagctggtcaagaccatggacctccccaagggcctgcagggggtgggacctggctgcacggatgagacgctgctgtcggccatcgccagcgccctgcacactagcaccatgcccatcacgggacagctctcggccgccgtggagaagaaccccggcgtatggctcaacaccacgcagcccctgtgcaaagccttcatggtgaccgacgaggacatcaggaagcaggaagagctggtgcagcaggtgcggaagcggctggaggaggcgctgatggccgacatgctggcgcacgtggaggagctggcccgtgacggggaggcgccgctggacaaggcctgcgctgaggacgacgacgaggaagacgaggaggaggaggaggaggagcccgacccggacccggagatggagcacgtctagggcagaggccctgccgagagcccgtgctgcctgctggagccgcctgcagacgcggtcctcggccccacgtgaaccaggctcggcggcgaagcccagccttggagacacccagnagnaaggccgtgctcctggcttccttcctcggnccgtcccacttccnggggcctcggggcacacagctggggctgcccccacccgaaanancctccangctcgtcntctaanantcnggntncggaaatgccgggtgctcntggncctgnctggntcntananctttgggctcnaggccantcctcccatgcccnttttccacttnttnaaatggaanaancanaaggnccnggaantnggcccnngtttgttaaaattgnaagntttntggtttgaggntanttttaaattcantccccntgnnnnngggagangantntnttttnttgggggnannaaaagnnccc

SEQ ID NO: 50 - DNA, 1308 bp, Homo Sapiens
  misc_feature (904)..(904): n is a, c, g, or t
  misc_feature (917)..(917): n is a, c, g, or t
  misc_feature (936)..(936): n is a, c, g, or t
  misc_feature (957)..(957): n is a, c, g, or t
  misc_feature (960)..(960): n is a, c, g, or t
  misc_feature (969)..(969): n is a, c, g, or t
  misc_feature (983)..(983): n is a, c, g, or t
  misc_feature (988)..(988): n is a, c, g, or t
  misc_feature (990)..(990): n is a, c, g, or t
  misc_feature (994)..(994): n is a, c, g, or t
  misc_feature (1007)..(1007): n is a, c, g, or t
  misc_feature (1013)..(1013): n is a, c, g, or t
  misc_feature (1022)..(1022): n is a, c, g, or t
  misc_feature (1040)..(1040): n is a, c, g, or t
  misc_feature (1066)..(1066): n is a, c, g, or t
  misc_feature (1069)..(1069): n is a, c, g, or t
  misc_feature (1082)..(1083): n is a, c, g, or t
  misc_feature (1089)..(1089): n is a, c, g, or t
  misc_feature (1093)..(1093): n is a, c, g, or t
  misc_feature (1108)..(1108): n is a, c, g, or t
  misc_feature (1110)..(1110): n is a, c, g, or t
  misc_feature (1118)..(1118): n is a, c, g, or t
  misc_feature (1121)..(1121): n is a, c, g, or t
  misc_feature (1131)..(1132): n is a, c, g, or t
  misc_feature (1137)..(1137): n is a, c, g, or t
  misc_feature (1141)..(1141): n is a, c, g, or t
  misc_feature (1148)..(1148): n is a, c, g, or t
  misc_feature (1150)..(1151): n is a, c, g, or t
  misc_feature (1156)..(1156): n is a, c, g, or t
  misc_feature (1163)..(1163): n is a, c, g, or t
  misc_feature (1166)..(1166): n is a, c, g, or t
  misc_feature (1175)..(1175): n is a, c, g, or t
  misc_feature (1186)..(1186): n is a, c, g, or t
  misc_feature (1188)..(1188): n is a, c, g, or t
  misc_feature (1194)..(1194): n is a, c, g, or t
  misc_feature (1197)..(1197): n is a, c, g, or t
  misc_feature (1201)..(1201): n is a, c, g, or t
  misc_feature (1203)..(1204): n is a, c, g, or t
  misc_feature (1212)..(1213): n is a, c, g, or t
  misc_feature (1215)..(1215): n is a, c, g, or t
  misc_feature (1217)..(1217): n is a, c, g, or t
  misc_feature (1221)..(1221): n is a, c, g, or t
  misc_feature (1243)..(1243): n is a, c, g, or t
  misc_feature (1250)..(1250): n is a, c, g, or t
  misc_feature (1263)..(1263): n is a, c, g, or t
  misc_feature (1276)..(1276): n is a, c, g, or t
  misc_feature (1281)..(1281): n is a, c, g, or t
  misc_feature (1283)..(1283): n is a, c, g, or t
  misc_feature (1285)..(1286): n is a, c, g, or t
  misc_feature (1298)..(1298): n is a, c, g, or t
attagagaaaattactatgagaggatcgcatcaccatcaccatcacggatcctatttaggtgacactatagaatcgtcgacccacgcgtccgcaactgaagaagaaattcaggaaatctgcttaaagatcttgcagctttatgctcggaaaaaggttgatctcacacacctggagggtgaagtggaaaaaagaaagcacgctatcgaagaggcaaaggcccaagcccggggcctgttgcctgggggcacacaggtgctggatggtacctcggggttctctcctgcccccaagctggtggaatcccccaaagaaggtaaagggagcaagccttccccactgtctgtgaagaacaccaagaggaggctggagggcgccaagaaagccaaggcggacagccccgtgaacggcttgccaaaggggcgagagagtcggagtcggagccggagccgtgagcagagctactcgaggtccccatcccgatcagcgtctcctaagaggaggaaaagtgacagcggctccacatctggtgggtccaagtcgcagagccgctcccggagcaggagtgactccccaccgagacaggccccccgcagcgctccctacaaaggctctgagattcggggctcccggaagtccaaggactgcaagtacccccagaagccacacaagtctcggagccggagttcttcccgttctcgaagcaggtcacgggagcgggcggataatccgggaaaatacaagaagaaaagtcattactacagagatcagcgacgagagcgctcgaggtcgtatgaacgcacaggccgtcgctatgagcgggaccaccctgggcacagcagggcatcggaggtgaggcggggttgcagtgactgggtggccgcagcccttccctggggaagtacntgatggctgcccntttgacccccggtggctgnccctttgacccccggggtgtngcntcttcaccncaaagtgggtcctnaaaanangaanttcctttttttgnaaattnttttgttcnaacttggaaaccttgggngggaattttggaaaattgggaaattnganggggaaccgggtnnaaaccnttgnttttcaaaaccgggntnctgggggnttncgggcccaannccttngggnccccgtngnnagggnttctaanttntgggaaacnatcttttttgnangggccnccntctntnnaaaaaaanntntnatgncccccccccccctttttttggngcgtggnccctggccatggncctgggtggtttntttgnananncccttttttccncttcccccaa

SEQ ID NO: 51 - DNA, 256 bp, Homo Sapiens
  misc_feature (1)..(2): n is a, c, g, or t
  misc_feature (6)..(6): n is a, c, g, or t
nncctntgagaggatcgcatcaccatcaccatcacggatcctatttaggtgacactatagaatcgtcgacccacgcgtccgattttggggactttgaaaaaagaattcctcgtgaagagatgttacaaatgcaagatattgtactaaatgaagttaaaaaagtggattctgaatacattgctacagtctgtggcagtttcagaagaggtgcagagtccagtggtgacatggatgttctcctgacccatcccagctt

SEQ ID NO: 52 - DNA, 256 bp, Homo Sapiens
ccatctgcggtggagccgccaccaaaatgcagattttcgtgaaaacccttacggggaagaccatcaccctcgaggttgaaccctcggatacgatagaaaatgtaaaggccaagatccaggataaggaaggaattcctcctgatcagcagagactgatctttgctggcaagcagctggaagatggacgtactttgtctgactacaatattcaaaaggagtctactcttcatcttgtgttgagacttcgtggtggtgc

SEQ ID NO: 53 - DNA, 256 bp, Homo Sapiens
  misc_feature (4)..(4): n is a, c, g, or t
cttnagaggagaattaactatgagaggatcgcatcaccatcaccatcacggatcctatttaggtgacactatagaatcgtcgacccacgcgtccggagatatctgcaatgatgtactgtctcttttggaaaagttcttgatccccaatgcttcacaagcagagagcaaagtcttctatttgaaaatgaaaggagattactaccgttacttggctgaggttgccgctggtgatgacaagaaagggattgtcgatcag

SEQ ID NO: 54 - DNA, 256 bp, Homo Sapiens
  misc_feature (2)..(2): n is a, c, g, or t
  misc_feature (5)..(5): n is a, c, g, or t
  misc_feature (13)..(18): n is a, c, g, or t
  misc_feature (22)..(22): n is a, c, g, or t
  misc_feature (25)..(25): n is a, c, g, or t
  misc_feature (27)..(27): n is a, c, g, or t
  misc_feature (32)..(32): n is a, c, g, or t
  misc_feature (34)..(34): n is a, c, g, or t
  misc_feature (40)..(40): n is a, c, g, or t
  misc_feature (45)..(45): n is a, c, g, or t
  misc_feature (59)..(59): n is a, c, g, or t
  misc_feature (62)..(62): n is a, c, g, or t
  misc_feature (70)..(71): n is a, c, g, or t
  misc_feature (73)..(73): n is a, c, g, or t
  misc_feature (75)..(75): n is a, c, g, or t
  misc_feature (77)..(78): n is a, c, g, or t
  misc_feature (87)..(87): n is a, c, g, or t
  misc_feature (95)..(96): n is a, c, g, or t
  misc_feature (103)..(104): n is a, c, g, or t
  misc_feature (108)..(108): n is a, c, g, or t
  misc_feature (121)..(121): n is a, c, g, or t
  misc_feature (132)..(132): n is a, c, g, or t
  misc_feature (136)..(137): n is a, c, g, or t
  misc_feature (148)..(148): n is a, c, g, or t
  misc_feature (155)..(155): n is a, c, g, or t
  misc_feature (157)..(157): n is a, c, g, or t
  misc_feature (169)..(170): n is a, c, g, or t
  misc_feature (179)..(180): n is a, c, g, or t
  misc_feature (192)..(192): n is a, c, g, or t
  misc_feature (194)..(194): n is a, c, g, or t
  misc_feature (206)..(206): n is a, c, g, or t
  misc_feature (208)..(208): n is a, c, g, or t
  misc_feature (212)..(212): n is a, c, g, or t
  misc_feature (214)..(214): n is a, c, g, or t
  misc_feature (218)..(218): n is a, c, g, or t
  misc_feature (223)..(224): n is a, c, g, or t
  misc_feature (229)..(229): n is a, c, g, or t
  misc_feature (234)..(234): n is a, c, g, or t
  misc_feature (241)..(243): n is a, c, g, or t
  misc_feature (245)..(246): n is a, c, g, or t
  misc_feature (251)..(252): n is a, c, g, or t
  misc_feature (254)..(254): n is a, c, g, or t
anaanaaaaaaannnnnnaaanaananaaaananaaaaanttttnggggggggtctctnccnccccctcnnantntnnggggggtcnctttattnntgggggnncccnttataaaagcgcncccacccacancgcnncgcggagcaangtgagananactccagagagnnccccctttnnagactgctcccncnagctaggggcgncngccngnagcngttgnncaccntcatnctgctgnnntnntaagnnanaa

SEQ ID NO: 55 - DNA, 256 bp, Homo Sapiens
  misc_feature (3)..(3): n is a, c, g, or t
  misc_feature (8)..(11): n is a, c, g, or t
  misc_feature (13)..(13): n is a, c, g, or t
  misc_feature (17)..(17): n is a, c, g, or t
  misc_feature (27)..(27): n is a, c, g, or t
ttnaaaannnntntaantccccaattnttaaagcaggagaaattaactatgagaggatcgcatcaccatcaccatcacggatcctatttaggtgacactatagaatcgtcgacccacgcgtccgcgacctacgcacacgagaacatgcctctcgcaaaggatctccttcatccctctccagaagaggagaagaggaaacacaagaagaaacgcctggtgcagagccccaattcctacttcatggatgtgaaatgcc

SEQ ID NO: 56 - DNA, 256 bp, Homo Sapiens
  misc_feature (3)..(4): n is a, c, g, or t
ttnnctatgagaggatcgcatcaccatcaccatcacggatcctatttaggtgacactatagaatcgtcgacccacgcgtccggggcggtgctggtttttcgctcgtcgactgcggctcttcctcgggcagcggaagcggcgcggcggtcggagaagtggcctaaaacttcggcgttgggtgaaagaaaatggcccgaaccaagcagactgctcgtaagtccaccggtgggaaagccccccgcaaacagctggccac

SEQ ID NO: 57 - DNA, 256 bp, Homo Sapiens
tagagaaattactatgagaggatcgcatcaccatcaccatcacggatcctatttaggtgacactatagaatcgtcgacccacgcgtccgcccacgcgtccgcggacgcgtgggcagaacaggatggggacagcagcaagaccatcgagatcagcgacatgaagtaccacatttttcagatgatgatgcagtatctgtactacggaggaacagaatccatggagatccccaccactgacatcctggagctgctgtca

SEQ ID NO: 58 - DNA, 1376 bp, Homo Sapiens
  misc_feature (1)..(1): n is a, c, g, or t
  misc_feature (833)..(833): n is a, c, g, or t
  misc_feature (866)..(866): n is a, c, g, or t
  misc_feature (892)..(892): n is a, c, g, or t
  misc_feature (897)..(897): n is a, c, g, or t
  misc_feature (899)..(899): n is a, c, g, or t
  misc_feature (907)..(907): n is a, c, g, or t
  misc_feature (910)..(910): n is a, c, g, or t
  misc_feature (950)..(950): n is a, c, g, or t
  misc_feature (956)..(956): n is a, c, g, or t
  misc_feature (960)..(960): n is a, c, g, or t
  misc_feature (989)..(989): n is a, c, g, or t
  misc_feature (1005)..(1005): n is a, c, g, or t
  misc_feature (1007)..(1007): n is a, c, g, or t
  misc_feature (1018)..(1018): n is a, c, g, or t
  misc_feature (1035)..(1035): n is a, c, g, or t
  misc_feature (1041)..(1041): n is a, c, g, or t
  misc_feature (1058)..(1058): n is a, c, g, or t
  misc_feature (1065)..(1065): n is a, c, g, or t
  misc_feature (1072)..(1072): n is a, c, g, or t
  misc_feature (1074)..(1076): n is a, c, g, or t
  misc_feature (1078)..(1078): n is a, c, g, or t
  misc_feature (1080)..(1081): n is a, c, g, or t
  misc_feature (1087)..(1087): n is a, c, g, or t
  misc_feature (1089)..(1089): n is a, c, g, or t
  misc_feature (1091)..(1091): n is a, c, g, or t
  misc_feature (1105)..(1105): n is a, c, g, or t
  misc_feature (1111)..(1112): n is a, c, g, or t
  misc_feature (1115)..(1115): n is a, c, g, or t
  misc_feature (1117)..(1117): n is a, c, g, or t
  misc_feature (1119)..(1120): n is a, c, g, or t
  misc_feature (1123)..(1123): n is a, c, g, or t
  misc_feature (1131)..(1131): n is a, c, g, or t
  misc_feature (1133)..(1133): n is a, c, g, or t
  misc_feature (1141)..(1141): n is a, c, g, or t
  misc_feature (1143)..(1143): n is a, c, g, or t
  misc_feature (1145)..(1145): n is a, c, g, or t
  misc_feature (1147)..(1147): n is a, c, g, or t
  misc_feature (1153)..(1153): n is a, c, g, or t
  misc_feature (1155)..(1155): n is a, c, g, or t
  misc_feature (1157)..(1158): n is a, c, g, or t
  misc_feature (1161)..(1165): n is a, c, g, or t
  misc_feature (1168)..(1168): n is a, c, g, or t
  misc_feature (1178)..(1179): n is a, c, g, or t
  misc_feature (1181)..(1181): n is a, c, g, or t
  misc_feature (1183)..(1184): n is a, c, g, or t
  misc_feature (1196)..(1196): n is a, c, g, or t
  misc_feature (1199)..(1199): n is a, c, g, or t
  misc_feature (1204)..(1205): n is a, c, g, or t
  misc_feature (1211)..(1211): n is a, c, g, or t
  misc_feature (1215)..(1215): n is a, c, g, or t
  misc_feature (1218)..(1218): n is a, c, g, or t
  misc_feature (1223)..(1225): n is a, c, g, or t
  misc_feature (1229)..(1230): n is a, c, g, or t
  misc_feature (1233)..(1235): n is a, c, g, or t
  misc_feature (1240)..(1240): n is a, c, g, or t
  misc_feature (1245)..(1245): n is a, c, g, or t
  misc_feature (1259)..(1259): n is a, c, g, or t
  misc_feature (1264)..(1264): n is a, c, g, or t
  misc_feature (1267)..(1267): n is a, c, g, or t
  misc_feature (1272)..(1272): n is a, c, g, or t
  misc_feature (1274)..(1274): n is a, c, g, or t
  misc_feature (1279)..(1279): n is a, c, g, or t
  misc_feature (1283)..(1283): n is a, c, g, or t
  misc_feature (1292)..(1292): n is a, c, g, or t
  misc_feature (1300)..(1300): n is a, c, g, or t
  misc_feature (1303)..(1303): n is a, c, g, or t
  misc_feature (1309)..(1309): n is a, c, g, or t
  misc_feature (1311)..(1311): n is a, c, g, or t
  misc_feature (1321)..(1321): n is a, c, g, or t
  misc_feature (1330)..(1330): n is a, c, g, or t
  misc_feature (1333)..(1334): n is a, c, g, or t
  misc_feature (1336)..(1340): n is a, c, g, or t
  misc_feature (1342)..(1342): n is a, c, g, or t
  misc_feature (1346)..(1346): n is a, c, g, or t
  misc_feature (1348)..(1351): n is a, c, g, or t
  misc_feature (1359)..(1359): n is a, c, g, or t
  misc_feature (1361)..(1361): n is a, c, g, or t
  misc_feature (1365)..(1365): n is a, c, g, or t
  misc_feature (1367)..(1368): n is a, c, g, or t
  misc_feature (1371)..(1371): n is a, c, g, or t
  misc_feature (1376)..(1376): n is a, c, g, or t
naatagagaaattaactatgaagaggatcgcatcaccatcaccatcacggatcctatttaggtgacactatagaatcgtcgacccacgcgtccggtagcaggcggggaccgaacgggtgcctcagtgtccttcccctcccctcgcctggcctcgccgtcctctccccgcagccggaccggaactatgtgatcccggaagttccggggcctttgctgtgtgggataaacagtaatggcggaggctgcaactcccggaacaacagccacaacatcaggagcaggagcggcagcggcgacggcggcagcagcctcccccaccccgatccccacagtcaccgccccgtccctgggggcgggcggagggggcggcggcagcgacggcagcggcggcggctggactaaacaggtcacctgcaggtattttatgcatggggtttgtaaggaaggagacaactgtcgctactcgcatgacctctctgacagtccgtatagtgtagtgtgcaagtattttcagcgagggtactgtatttatggagaccgctgcagatatgaacatagcaaaccattgaaacaggaagaagcaactgctacagagctaactacaaagtcatcccttgctgcttcctcaagtctctcatcgatagttggaccacttgttgaaatgaatacaggcgaagctgagtcaagaaattcaaactttgcaactgtaggagcaggttcagaggactgggtgaatgctattgagtttgttcctgggcaaccctactgtggccgtactgcgccttcctgcactgaagcacccctgcagggctcagtgaccaaggaagaatcanagaaagagcaaccgccgtggagacaaagaacanctgtgcccctatgctgcatgggaaantgccnanacgggganaantgtgtgtatctccacggaaattcttgtgaaatgtgtgggnctgcangtcntgcatcaaatggatgctgcccaaaaattncaacatataaatcgtnantgaagcccatnaaaaagaaatggaactntcattnccggcaacccaacaagnaaatggnggggggnannntncnnggaggngntntataaaaaaaccanccccanngangncnnttnggaatctntnccaatggnancnancctaangntnnaannnnnttnccaaagggannangnntaaccattttanaanaaatnnaaaggnaaanccnccccnnncttnnttnnnttttnttttngggaaaaataaaanttggncanttttncnaaagnaccntttaagggntttttttnaangggaantnaggggatttnttttttttnccnntnnnnnangggncnnnntttttaananaaangnnttnaaatn

SEQ ID NO: 59 - DNA, 256 bp, Homo Sapiens
  misc_feature (2)..(2): n is a, c, g, or t
tnactatgagaggatcgcatcaccatcaccatcacggatcctatttaggtgacactatagaatcgtcgacccacgcgtccgcgaacatggcgaccgcgcgcaccttcgggcccgagcgggaagccgagccggccaaggaagcgcgcgtcgtgggctcggagcttgtggacacttatacggtttacatcatccaggtcactgatggcagccatgagtggacagtaaagcaccgctacagcgacttccatgacctgca

SEQ ID NO: 60 - DNA, 256 bp, Homo Sapiens
  misc_feature (5)..(5): n is a, c, g, or t
  misc_feature (11)..(11): n is a, c, g, or t
  misc_feature (16)..(16): n is a, c, g, or t
  misc_feature (18)..(18): n is a, c, g, or t
  misc_feature (20)..(20): n is a, c, g, or t
  misc_feature (23)..(23): n is a, c, g, or t
  misc_feature (26)..(28): n is a, c, g, or t
  misc_feature (78)..(78): n is a, c, g, or t
  misc_feature (82)..(82): n is a, c, g, or t
tttcntttgtngcggnanantantannngattaattgtagcggatacaatttacacagaattattaagaggagaaatnactntgagaggatcgcataccatcaccatcacggatcctatttaggtgacactatagaatcgtcgacccacgcgtccggatcactgcgaccagaggaaattgaagagctccgagaggccttcagagaattcgacaaggacaaggatggctacatcaactgccgggatctgggcaactg

SEQ ID NO: 61 - DNA, 256 bp, Homo Sapiens
  misc_feature (13)..(13): n is a, c, g, or t
tcttaaagagganaattaactatgagagggatcgcatcaccatcaccatcacggatcctatttaggtgacactatagaatcgtcgacccacgcgtccggctcgccttacaactccgcgcggcctcggtcccctgcgccgcccgccccacaacaaaactcagcgcagcgctcccgggcgcccggttcagagcgacctgcggctcagagcggaggggagactgaccggagcgcggatcgggacagcggccgggacagc

SEQ ID NO: 62 - DNA, 1382 bp, Homo Sapiens
  misc_feature (14)..(14): n is a, c, g, or t
  misc_feature (697)..(697): n is a, c, g, or t
  misc_feature (707)..(709): n is a, c, g, or t
  misc_feature (711)..(742): n is a, c, g, or t
  misc_feature (787)..(787): n is a, c, g, or t
  misc_feature (792)..(792): n is a, c, g, or t
  misc_feature (811)..(811): n is a, c, g, or t
  misc_feature (897)..(897): n is a, c, g, or t
  misc_feature (921)..(921): n is a, c, g, or t
  misc_feature (930)..(930): n is a, c, g, or t
  misc_feature (959)..(959): n is a, c, g, or t
  misc_feature (963)..(963): n is a, c, g, or t
  misc_feature (966)..(966): n is a, c, g, or t
  misc_feature (973)..(974): n is a, c, g, or t
  misc_feature (981)..(981): n is a, c, g, or t
  misc_feature (988)..(988): n is a, c, g, or t
  misc_feature (997)..(997): n is a, c, g, or t
  misc_feature (1009)..(1009): n is a, c, g, or t
  misc_feature (1012)..(1013): n is a, c, g, or t
  misc_feature (1015)..(1015): n is a, c, g, or t
  misc_feature (1018)..(1018): n is a, c, g, or t
  misc_feature (1021)..(1021): n is a, c, g, or t
  misc_feature (1025)..(1025): n is a, c, g, or t
  misc_feature (1038)..(1038): n is a, c, g, or t
  misc_feature (1041)..(1041): n is a, c, g, or t
  misc_feature (1043)..(1044): n is a, c, g, or t
  misc_feature (1048)..(1048): n is a, c, g, or t
  misc_feature (1062)..(1062): n is a, c, g, or t
  misc_feature (1078)..(1079): n is a, c, g, or t
  misc_feature (1090)..(1090): n is a, c, g, or t
  misc_feature (1097)..(1097): n is a, c, g, or t
  misc_feature (1102)..(1102): n is a, c, g, or t
  misc_feature (1105)..(1105): n is a, c, g, or t
  misc_feature (1113)..(1113): n is a, c, g, or t
  misc_feature (1118)..(1118): n is a, c, g, or t
  misc_feature (1132)..(1132): n is a, c, g, or t
  misc_feature (1136)..(1136): n is a, c, g, or t
  misc_feature (1139)..(1139): n is a, c, g, or t
  misc_feature (1143)..(1143): n is a, c, g, or t
  misc_feature (1148)..(1149): n is a, c, g, or t
  misc_feature (1163)..(1163): n is a, c, g, or t
  misc_feature (1166)..(1167): n is a, c, g, or t
  misc_feature (1173)..(1174): n is a, c, g, or t
  misc_feature (1177)..(1177): n is a, c, g, or t
  misc_feature (1181)..(1181): n is a, c, g, or t
  misc_feature (1185)..(1185): n is a, c, g, or t
  misc_feature (1188)..(1189): n is a, c, g, or t
  misc_feature (1191)..(1191): n is a, c, g, or t
  misc_feature (1196)..(1196): n is a, c, g, or t
  misc_feature (1220)..(1221): n is a, c, g, or t
  misc_feature (1224)..(1224): n is a, c, g, or t
  misc_feature (1226)..(1227): n is a, c, g, or t
  misc_feature (1233)..(1233): n is a, c, g, or t
  misc_feature (1237)..(1237): n is a, c, g, or t
  misc_feature (1255)..(1256): n is a, c, g, or t
  misc_feature (1258)..(1258): n is a, c, g, or t
  misc_feature (1265)..(1268): n is a, c, g, or t
  misc_feature (1272)..(1272): n is a, c, g, or t
  misc_feature (1275)..(1276): n is a, c, g, or t
  misc_feature (1278)..(1278): n is a, c, g, or t
  misc_feature (1283)..(1283): n is a, c, g, or t
  misc_feature (1285)..(1285): n is a, c, g, or t
  misc_feature (1289)..(1289): n is a, c, g, or t
  misc_feature (1295)..(1295): n is a, c, g, or t
  misc_feature (1298)..(1299): n is a, c, g, or t
  misc_feature (1301)..(1301): n is a, c, g, or t
  misc_feature (1308)..(1308): n is a, c, g, or t
  misc_feature (1311)..(1311): n is a, c, g, or t
  misc_feature (1314)..(1314): n is a, c, g, or t
  misc_feature (1317)..(1317): n is a, c, g, or t
  misc_feature (1320)..(1320): n is a, c, g, or t
  misc_feature (1326)..(1328): n is a, c, g, or t
  misc_feature (1332)..(1332): n is a, c, g, or t
  misc_feature (1338)..(1338): n is a, c, g, or t
  misc_feature (1345)..(1345): n is a, c, g, or t
  misc_feature (1353)..(1353): n is a, c, g, or t
  misc_feature (1355)..(1357): n is a, c, g, or t
  misc_feature (1361)..(1361): n is a, c, g, or t
  misc_feature (1367)..(1367): n is a, c, g, or t
  misc_feature (1369)..(1369): n is a, c, g, or t
  misc_feature (1373)..(1373): n is a, c, g, or t
  misc_feature (1379)..(1379): n is a, c, g, or t
  misc_feature (1382)..(1382): n is a, c, g, or t
aatagagagattanctatgagaggatcgcatcaccatcaccatcacggatcctatttaggtgacactatagaatcgtcgacccacgcgtccggtggttcccaaagatgtcaatgctgccattgccaccatcaagaccaagcgtaccatccagtttgtggattggtgccccactggcttcaaggttggcatcaactaccagcctcccactgtggtgcctggtggagacctggccaaggtacagagagctgtgtgcatgctgagcaacaccacagccattgctgaggcctgggctcgcctggaccacaagtttgacctgatgtatgccaaacgtgcctttgttcactggtacgttggggaggggatggaggaaggtgagttttcagaggcccgtgaggacatggctgcccttgagaaggattatgaggaggttggtgtggattctgttgaaggagagggtgaggaagaaggagaggaatactaaagttaaaacgtcacaaaggtgctgcttttacagggaagcttattctgttttaaacattgaaaagttgtggtctgatcagttaatttgtatgtagcagtgtatgctctcatatacaattactgacctatgctctaaaacatgaatgctttgttacagacccaagctgtccatttctgtgatgggttttgaataaagtattccctgtcttaaatganaaaaaaaaannnannnnnnnnnnnnnnnnnnnnnnnnnnnnnnnnaaagggcggccgctccctatagtgagtcgtattaagcttaattanctgancttggactcctgttgatanatccagtaatgacctcaaaactccatctggatttgttcaaaacgctcggttgcccccgggcgtttttttattggtgaaaatccaanctagcttggcgaaattttccgganctaaggaanctaaaatggaaaaaaaaatccctggatanaccnccnttgaaanntcccaanggcaccnaaaaaaaantttgaggcattncanncnttnccncaangaacctaaaaccnaancnnttcncctggaattaacgncctttttaaaaaccgnnaaaaaaaaaancccaaanttttnccnggcctttnttccnatttttgccccccngaanaangccnccccnnaatttcctaatggnaannaaaaannggnaacngggnaanngnaaaangttccccttttaacccttttcccnnaananngaaaantttnccccccggaagaaaaacnnanaatttcnnnntttncannanatttncnaaangggggnttnngnaaacccnccnttnccnaanggtttnnnaaantttttnccccccnccccgggnannncccnttttanancccnaaaaanctn

SEQ ID NO: 63 - DNA, 256 bp, Homo Sapiens
  misc_feature (1)..(1): n is a, c, g, or t
  misc_feature (3)..(3): n is a, c, g, or t
nanctatgagaggatcgcatcaccatcaccatcacggatcctatttaggtgacactatagaatcgtcgacccacgcgtccgagaaatcacaggaagtggaggataagacccgggccaatgagcagctgacagacgagctggcccagaaaacgactacattgacaaccacacagagagagctgagccagctacaagagcttagcaaccaccagaagaaaagggcaactgagatcctgaatttgctgttgaaagatct

SEQ ID NO: 64 - DNA, 1343 bp, Homo Sapiens
  misc_feature (820)..(820): n is a, c, g, or t
  misc_feature (931)..(931): n is a, c, g, or t
  misc_feature (949)..(949): n is a, c, g, or t
  misc_feature (957)..(957): n is a, c, g, or t
  misc_feature (979)..(979): n is a, c, g, or t
  misc_feature (985)..(985): n is a, c, g, or t
  misc_feature (990)..(990): n is a, c, g, or t
  misc_feature (992)..(992): n is a, c, g, or t
  misc_feature (1006)..(1006): n is a, c, g, or t
  misc_feature (1036)..(1036): n is a, c, g, or t
  misc_feature (1038)..(1038): n is a, c, g, or t
  misc_feature (1053)..(1053): n is a, c, g, or t
  misc_feature (1059)..(1059): n is a, c, g, or t
  misc_feature (1064)..(1064): n is a, c, g, or t
  misc_feature (1074)..(1074): n is a, c, g, or t
  misc_feature (1080)..(1080): n is a, c, g, or t
  misc_feature (1082)..(1082): n is a, c, g, or t
  misc_feature (1086)..(1086): n is a, c, g, or t
  misc_feature (1090)..(1090): n is a, c, g, or t
  misc_feature (1097)..(1098): n is a, c, g, or t
  misc_feature (1100)..(1102): n is a, c, g, or t
  misc_feature (1104)..(1104): n is a, c, g, or t
  misc_feature (1107)..(1107): n is a, c, g, or t
  misc_feature (1113)..(1113): n is a, c, g, or t
  misc_feature (1125)..(1126): n is a, c, g, or t
  misc_feature (1128)..(1128): n is a, c, g, or t
  misc_feature (1146)..(1146): n is a, c, g, or t
  misc_feature (1148)..(1148): n is a, c, g, or t
  misc_feature (1152)..(1152): n is a, c, g, or t
  misc_feature (1168)..(1168): n is a, c, g, or t
  misc_feature (1175)..(1176): n is a, c, g, or t
  misc_feature (1193)..(1193): n is a, c, g, or t
  misc_feature (1203)..(1203): n is a, c, g, or t
  misc_feature (1206)..(1206): n is a, c, g, or t
  misc_feature (1210)..(1210): n is a, c, g, or t
  misc_feature (1214)..(1214): n is a, c, g, or t
  misc_feature (1220)..(1222): n is a, c, g, or t
  misc_feature (1224)..(1224): n is a, c, g, or t
  misc_feature (1231)..(1231): n is a, c, g, or t
  misc_feature (1233)..(1233): n is a, c, g, or t
  misc_feature (1238)..(1239): n is a, c, g, or t
  misc_feature (1243)..(1243): n is a, c, g, or t
  misc_feature (1245)..(1245): n is a, c, g, or t
  misc_feature (1248)..(1248): n is a, c, g, or t
  misc_feature (1250)..(1250): n is a, c, g, or t
  misc_feature (1254)..(1254): n is a, c, g, or t
  misc_feature (1258)..(1258): n is a, c, g, or t
  misc_feature (1261)..(1261): n is a, c, g, or t
  misc_feature (1263)..(1263): n is a, c, g, or t
  misc_feature (1267)..(1267): n is a, c, g, or t
  misc_feature (1277)..(1278): n is a, c, g, or t
  misc_feature (1280)..(1280): n is a, c, g, or t
  misc_feature (1282)..(1282): n is a, c, g, or t
  misc_feature (1284)..(1284): n is a, c, g, or t
  misc_feature (1289)..(1291): n is a, c, g, or t
  misc_feature (1295)..(1295): n is a, c, g, or t
  misc_feature (1298)..(1298): n is a, c, g, or t
  misc_feature (1306)..(1307): n is a, c, g, or t
  misc_feature (1310)..(1310): n is a, c, g, or t
  misc_feature (1323)..(1323): n is a, c, g, or t
  misc_feature (1327)..(1337): n is a, c, g, or t
  misc_feature (1339)..(1342): n is a, c, g, or t
aatagagaaattactatgagaggatcgcatcaccatcaccatcacggatcctatttaggtgacactatagaatcgtcgacccacgcgtccgaggatgcctgcgagcatctggcggagtacttggaagcctattggaaggccacacacccgcccagcagcacgccacccaatccgctgctgaaccgcaccatggctaccgcagccctggctgccagccctgcccctgtctccaacctccagggaccctaccttgcttccggggaccagccactggaacgggccaccggggagcacgccagcatgcacgagtacccaggggagctgggccagcccccaggcctttaccccagcagccacccaccaggccgggcaggcacgctacgggcactgtcccgccaagacacttttgatgccgacacccccggcagccgaaactctgcctacacggagctgggagactcatgtgtggacatggagactgacccctcagaggggccagggcttggagaccctgcagggggcggcacgcccccagcccgacagggatcctgggaggacgaggaagaagactatgaggaagagctgaccgacaaccggaaccggggccggaataaggcccgctactgcgctgagggtgggggtccagttttggggcgcaacaagaatgagctggagggctggggacgaggcgtctacattcgctgagaggcaggggccacacggcgggaggaagggctctgagcccaggggaggggagggagcgaggggctcacacctgacatgtattcgcctccagggggcgctgtctccctcctttcanatgcctttgctcaaagcttggggtttctttggtgttaccatcccagctcccgggaaggcccttaagccccagctgtcggtttttacctgcctgttgtggatggatgggggnatacccacctttctgaantgtccccntttctccccatcttaaaggggnttttcnttccntncacccttcctaaanaaaaaggtggcactttccttaaattttttntnattcgggggcccctnaatgangggtnctaaatgggnatgggntnttcntttntcccaanntnnnanaantggggnaaagggctgggnncntttttcttggaaaagggnangccnaaaaattttttcccanggggggnnttttttcccaaaacccnaaaattcaanggntccntaanccttgnnngnccctttntnccaanntttntnggnanattntttnggntngggnaaaaccaaanntngnanccccnnngggnaantttttttnnggnaggttttgggggnaaannnnnnnnnnnannnnc

SEQ ID NO: 65 - DNA, 1200 bp, Homo Sapiens
  misc_feature (906)..(906): n is a, c, g, or t
  misc_feature (941)..(941): n is a, c, g, or t
  misc_feature (952)..(952): n is a, c, g, or t
  misc_feature (976)..(976): n is a, c, g, or t
  misc_feature (984)..(984): n is a, c, g, or t
  misc_feature (993)..(993): n is a, c, g, or t
  misc_feature (1004)..(1004): n is a, c, g, or t
  misc_feature (1011)..(1011): n is a, c, g, or t
  misc_feature (1014)..(1014): n is a, c, g, or t
  misc_feature (1024)..(1025): n is a, c, g, or t
  misc_feature (1033)..(1033): n is a, c, g, or t
  misc_feature (1037)..(1038): n is a, c, g, or t
  misc_feature (1047)..(1047): n is a, c, g, or t
  misc_feature (1049)..(1049): n is a, c, g, or t
  misc_feature (1055)..(1055): n is a, c, g, or t
  misc_feature (1062)..(1062): n is a, c, g, or t
  misc_feature (1066)..(1066): n is a, c, g, or t
  misc_feature (1068)..(1068): n is a, c, g, or t
  misc_feature (1075)..(1075): n is a, c, g, or t
  misc_feature (1082)..(1082): n is a, c, g, or t
  misc_feature (1087)..(1087): n is a, c, g, or t
  misc_feature (1090)..(1090): n is a, c, g, or t
  misc_feature (1095)..(1095): n is a, c, g, or t
  misc_feature (1127)..(1127): n is a, c, g, or t
  misc_feature (1132)..(1132): n is a, c, g, or t
  misc_feature (1134)..(1134): n is a, c, g, or t
  misc_feature (1137)..(1137): n is a, c, g, or t
  misc_feature (1160)..(1160): n is a, c, g, or t
  misc_feature (1169)..(1169): n is a, c, g, or t
  misc_feature (1199)..(1200): n is a, c, g, or t
tagagaaattactatgagaggatcgcatcaccatcaccatcacggatcctatttaggtgacactatagaatcgtcgacccacgcgtccgaaaagcatgataaagaaaaggaacaaaaggatcccaaaaagcttcgttcctttaaagtatctagcatagattcttcagaacagaaaaaaaccaagaaaaacttaaagaagtttcttacacgacgccccactttgcaagctgttcgtgaaaaaggttatattaaagatcaggtatttggatccaatctcgctaatctgtgtcagagagagaatggcacagtaccaaagtttgtgaagttatgtattgaacatgttgaagaacatggtttggatattgatgggatatacagagtaagtggcaacctcgcagtgatccagaaactaaggtttgcagtcaatcatgatgagaaattggacttgaatgacagtaaatgggaagatattcatgtcattactggagccctcaaaatgttttttcgagaattaccagaacctctttttacatttaatcattttaatgattttgttaatgcaattaagcaagaaccaagacagcgagtcgctgctgttaaggacctaatcagacagttgccaaagccaaaccaagacacaatgcagattcttttccgacatctcagaagagttatagaaaatggagagaaaaatcgaatgacctatcagagtatagcaattgtttttggtcccactctattaaaaccagaaaaagagactggtaatatagcagttcatactgtgtaccagaatcagattgtagaattaattcttctggaactgagttccatcttcggacgttgattcttactgaagacaacctgtggaatagaagctggattccatcagattccaatgtttatacncatgtattttattttttggaccaagcagtgactcnttgattttgcncttttttttttgagggatcaaaanggaagggnaaagtccanatgtgtgttangcccccnaanttgccgcttnnttgcaagntgannaaccggcgngnaattangaatccntttnanccggaangttggcnttccnacncgganttccgaaaatccaaacttaaaattctacccgncctananccngggaaaattgggaaaaaaacggnatttttttncccggaaatggaaaagggactttcctcccnn

SEQ ID NO: 66 - DNA, 256 bp, Homo Sapiens
gcgatgtccagtttgtcctgaggcgcacagggcccagcctagctgggaggccctcctcagacagctgtccacccccggaacgctgcctaattcgtgccagcctccctgtaaagccacgggctgcgctgggctgtgagccccgcaaaacactgacccccgagccagcccccagcctctcacgccctgggcctgcggcccctgtgacacccacaccaggctgctgcacagacctgcggggcctggagctcagagtgca

SEQ ID NO: 67 - DNA, 256 bp, Homo Sapiens
  misc_feature (19)..(19): n is a, c, g, or t
ttattaaagaggagaaatnacttgagaggatcgcatcaccatcaccatcacggatcctatttaggtgacactatagaatcgtcgacccacgcgtccgcccacgcgtccgcccacgcgtccgccaagacagacctggtccctgccttccagaacctgatgaaagactgtgaggccgaggtgagggccgcagcctcccacaaggtcaaagagttctgtgaaaacctctcagctgactgtcgggagaatgtgatcatgt

SEQ ID NO: 68 - DNA, 256 bp, Homo Sapiens
  misc_feature (6)..(6): n is a, c, g, or t
  misc_feature (8)..(8): n is a, c, g, or t
ctatgnanaggttcgcatcaccatcaccatcacggatcctatttaggtgacactatagaatcgtcgacccacgcgtccgcccacgcgtccgctcatgctggcaacaagctggccatgcaggagttcatgatcctcccagtgggagctgagagctttcgggatgccatgcgactaggtgcagaggtctaccatacactcaagggagtcatcaaggacaaatacggcaaggatgccaccaatgtgggggatgaaggtg

SEQ ID NO: 69 - DNA, 1307 bp, Homo Sapiens
  misc_feature (3)..(3): n is a, c, g, or t
  misc_feature (15)..(15): n is a, c, g, or t
  misc_feature (858)..(858): n is a, c, g, or t
  misc_feature (880)..(880): n is a, c, g, or t
  misc_feature (901)..(901): n is a, c, g, or t
  misc_feature (922)..(922): n is a, c, g, or t
  misc_feature (931)..(931): n is a, c, g, or t
  misc_feature (948)..(948): n is a, c, g, or t
  misc_feature (974)..(974): n is a, c, g, or t
  misc_feature (979)..(979): n is a, c, g, or t
  misc_feature (995)..(995): n is a, c, g, or t
  misc_feature (1003)..(1003): n is a, c, g, or t
  misc_feature (1009)..(1009): n is a, c, g, or t
  misc_feature (1020)..(1020): n is a, c, g, or t
  misc_feature (1030)..(1030): n is a, c, g, or t
  misc_feature (1036)..(1036): n is a, c, g, or t
  misc_feature (1047)..(1047): n is a, c, g, or t
  misc_feature (1052)..(1053): n is a, c, g, or t
  misc_feature (1056)..(1057): n is a, c, g, or t
  misc_feature (1060)..(1060): n is a, c, g, or t
  misc_feature (1082)..(1083): n is a, c, g, or t
  misc_feature (1096)..(1096): n is a, c, g, or t
  misc_feature (1100)..(1100): n is a, c, g, or t
  misc_feature (1103)..(1103): n is a, c, g, or t
  misc_feature (1108)..(1108): n is a, c, g, or t
  misc_feature (1110)..(1110): n is a, c, g, or t
  misc_feature (1122)..(1122): n is a, c, g, or t
  misc_feature (1128)..(1128): n is a, c, g, or t
  misc_feature (1138)..(1139): n is a, c, g, or t
  misc_feature (1142)..(1142): n is a, c, g, or t
  misc_feature (1145)..(1145): n is a, c, g, or t
  misc_feature (1149)..(1149): n is a, c, g, or t
  misc_feature (1153)..(1153): n is a, c, g, or t
  misc_feature (1160)..(1160): n is a, c, g, or t
  misc_feature (1167)..(1167): n is a, c, g, or t
  misc_feature (1169)..(1169): n is a, c, g, or t
  misc_feature (1175)..(1175): n is a, c, g, or t
  misc_feature (1182)..(1182): n is a, c, g, or t
  misc_feature (1185)..(1185): n is a, c, g, or t
  misc_feature (1194)..(1194): n is a, c, g, or t
  misc_feature (1198)..(1198): n is a, c, g, or t
  misc_feature (1204)..(1205): n is a, c, g, or t
  misc_feature (1209)..(1209): n is a, c, g, or t
  misc_feature (1214)..(1214): n is a, c, g, or t
  misc_feature (1216)..(1217): n is a, c, g, or t
  misc_feature (1222)..(1222): n is a, c, g, or t
  misc_feature (1231)..(1231): n is a, c, g, or t
  misc_feature (1244)..(1245): n is a, c, g, or t
  misc_feature (1250)..(1250): n is a, c, g, or t
  misc_feature (1255)..(1257): n is a, c, g, or t
  misc_feature (1261)..(1262): n is a, c, g, or t
  misc_feature (1273)..(1274): n is a, c, g, or t
  misc_feature (1279)..(1280): n is a, c, g, or t
  misc_feature (1282)..(1283): n is a, c, g, or t
  misc_feature (1286)..(1286): n is a, c, g, or t
  misc_feature (1292)..(1292): n is a, c, g, or t
  misc_feature (1298)..(1299): n is a, c, g, or t
  misc_feature (1304)..(1305): n is a, c, g, or t
  misc_feature (1307)..(1307): n is a, c, g, or t
atngagaaattactntgagaggatcgcatcaccatcaccatcacggatcctatttaggtgacactatagaatcgtcgacccacgcgatccgagcccgaacgccccatgaagttcctccgggagcacttcgagaagctggagaaggaagaaaacaggcagattttggcgcggcaaaagtcaaactcacagtcggactcccatgatgaggaggtgtcgcccacccccccgaaccctgtggtgaaggcccgccgccggcgaggaggcgtgagtgccgaggtgtacaccgaggaggacgccgtgtcctacgtcaggaaggtgattcccaaggactacaaaaccatgactgcgctggccaaggccatctccaagaacgtgctcttcgctcacctggatgacaacgagaggagtgacatattcgatgccatgttccctgtcactcacatcgctggggagactgttatacagcaagggaatgaaggagacaacttctatgtcgttgatcaaggggaagtggatgtgtacgtgaacggagagtgggtgaccaacatcagcgagggaggcagcttcggggagctggcgctcatctacggcacccccagggctgcgaccgtgaaagccaagacggacctcaagctctgggggatcgaccgggacagctaccggcgcatccttatgggcagcacgctgaggaaacgcaagatgtacgaggagttcctcagcaaggtctccatcctagagtccctggagaagtgggagcgtctgaccgtggcggatgcgctggagcccgtccagtttgaagatggagagaaaattgtggtccagggagagcctggggacgacttttacatcatcacgganggcaccgcgttccgtgctgcancgccggtcccccaatgaggantacgtggaaggtggggcgccntgggaaccntctgactactttcgggnaaattgcactgctgcttgaaaccggnccccngggcggcccactgtcnttggcccngggggnccccctcaagntgtgtgaaancttganccgggcccccnccttnnaannggngtgcttggggcccttgcttctnnaaattctccaaanaggnaanatttnanggtttaaaaaantttttnttttccttcnncgnttngaanaaantttcccnccctggnanccccantttcccnagnggggggggnccgngccctnncctnttgtntnnggggnccccggaanccccttttttaannttggncccgnnngggnntgggttccccnnacccnnannaanttcccnttcccnnaattnntn

SEQ ID NO: 70 - DNA, 256 bp, Homo Sapiens
ccgcacctacaccagccaacccagatcccgaggtccgacagcgcccggcccagatccccacgcctgccaggagcaagccgagagccagccggccggcgcactccgactccgagcagtctctgtccttcgacccgagccccgcgccctttccgggacccctgccccgcgggcagcgctgccaacctgccggccatggagaccccgtcccagcggcgcgccacccgcagcggggcgcaggccagctccactccgctgt

SEQ ID NO: 71 - DNA, 1414 bp, Homo Sapiens
  misc_feature (918)..(918): n is a, c, g, or t
  misc_feature (940)..(940): n is a, c, g, or t
  misc_feature (946)..(946): n is a, c, g, or t
  misc_feature (957)..(957): n is a, c, g, or t
  misc_feature (969)..(969): n is a, c, g, or t
  misc_feature (988)..(988): n is a, c, g, or t
  misc_feature (990)..(990): n is a, c, g, or t
  misc_feature (1004)..(1004): n is a, c, g, or t
  misc_feature (1038)..(1038): n is a, c, g, or t
  misc_feature (1049)..(1049): n is a, c, g, or t
  misc_feature (1070)..(1070): n is a, c, g, or t
  misc_feature (1075)..(1075): n is a, c, g, or t
  misc_feature (1077)..(1077): n is a, c, g, or t
  misc_feature (1079)..(1079): n is a, c, g, or t
  misc_feature (1081)..(1081): n is a, c, g, or t
  misc_feature (1084)..(1085): n is a, c, g, or t
  misc_feature (1088)..(1088): n is a, c, g, or t
  misc_feature (1098)..(1098): n is a, c, g, or t
  misc_feature (1106)..(1106): n is a, c, g, or t
  misc_feature (1128)..(1128): n is a, c, g, or t
  misc_feature (1141)..(1141): n is a, c, g, or t
  misc_feature (1150)..(1150): n is a, c, g, or t
  misc_feature (1157)..(1157): n is a, c, g, or t
  misc_feature (1161)..(1161): n is a, c, g, or t
  misc_feature (1196)..(1196): n is a, c, g, or t
  misc_feature (1201)..(1201): n is a, c, g, or t
  misc_feature (1204)..(1204): n is a, c, g, or t
  misc_feature (1208)..(1209): n is a, c, g, or t
  misc_feature (1213)..(1213): n is a, c, g, or t
  misc_feature (1216)..(1216): n is a, c, g, or t
  misc_feature (1218)..(1218): n is a, c, g, or t
  misc_feature (1221)..(1221): n is a, c, g, or t
  misc_feature (1225)..(1225): n is a, c, g, or t
  misc_feature (1254)..(1255): n is a, c, g, or t
  misc_feature (1259)..(1259): n is a, c, g, or t
  misc_feature (1268)..(1269): n is a, c, g, or t
  misc_feature (1271)..(1271): n is a, c, g, or t
  misc_feature (1288)..(1288): n is a, c, g, or t
  misc_feature (1292)..(1292): n is a, c, g, or t
  misc_feature (1301)..(1301): n is a, c, g, or t
  misc_feature (1303)..(1303): n is a, c, g, or t
  misc_feature (1306)..(1306): n is a, c, g, or t
  misc_feature (1309)..(1309): n is a, c, g, or t
  misc_feature (1315)..(1315): n is a, c, g, or t
  misc_feature (1325)..(1325): n is a, c, g, or t
  misc_feature (1328)..(1328): n is a, c, g, or t
  misc_feature (1337)..(1337): n is a, c, g, or t
  misc_feature (1339)..(1339): n is a, c, g, or t
  misc_feature (1341)..(1342): n is a, c, g, or t
  misc_feature (1345)..(1345): n is a, c, g, or t
  misc_feature (1353)..(1353): n is a, c, g, or t
  misc_feature (1361)..(1361): n is a, c, g, or t
  misc_feature (1364)..(1364): n is a, c, g, or t
  misc_feature (1370)..(1370): n is a, c, g, or t
  misc_feature (1380)..(1383): n is a, c, g, or t
  misc_feature (1387)..(1387): n is a, c, g, or t
  misc_feature (1400)..(1400): n is a, c, g, or t
  misc_feature (1408)..(1410): n is a, c, g, or t
  misc_feature (1414)..(1414): n is a, c, g, or t
tagagaaattactatgagaggatcgcatcaccatcaccatcacggatcctatttaggtgacactatagaatcgtcgacccacgcgtccgcggcgcgtgggttaacagactggatagaatttgaggagatagctgatctggaagaacgggcaaagagccagttttttgaaaaggtgcatgaagaagttgtgctcaaaactcaagaggctgctaaagaaaaagagttccaaagtgtacctgctggaccagctggagcagttgagagttgtgaaatctgtcaagaacaatttgaacaatactgggatgaagaagaggaggaatggcatttgaaaaatgctattagagtagatggaaagatttatcatccatcatgttatgaagattatcaaaatacatcttcatttgattgtacaccatctcccagcaagacaccagttgaaaaccccttgaatattatgttgaacattgtcaaaaacgaattgcaggaaccctgtgacagtcccaaagttaaggaagaacgaattgatacaccaccagcttgtacagaggaaagcatagcaacaccctctgaaattaaaacagaaaatgacacagtcgagtcagtttaaataaaatgagaaaggtatgtttttcttttttaaaaaagctgctgttggatctagaaggtgaagaatttttttatgtatatatagacatatctatataaattgtctggctgaggcagggccttcagctatcatttggttaataaatacattttagtatttgcatttcctactgcctgcagagtttcaggtgcttgttgtgtgaaagttctgtagatgtgtgcaaatttaacgaaatgaaattgtatgtgtaaaaatgtacgatttttcactgtgcaactgtaaattataaataaaaatatttttgctattcntggagtgtaatatttatgcacnccatcnaatagtttccngtactttttatngggtaaaatgggattgaanancacccccacataanatttttttctagtaccctcccctgattaaagaancaggtttgagnttcctccctccaaagggggtncccananancnccnntanggcttttccnaaaaaaancccgattttgaaaaattttaanaaaaaaaaggaanatttttgcnaaattantttntattacccaacccctccccggttaaaaaacccccnaagtnccntttnnaaantcnanggnccanttttttttgactgggaccggggcccccannttanaaattttanncnaagggtttttttttaancttncaatgccangnttnggnagaaantttttttaancgnacccaaaantncnnaangaaatttntttgtttnctnggcccnggttttttcnnnnaaangagaaaaaaaaangggccccnnntttn

SEQ ID NO: 72 - DNA, 256 bp, Homo Sapiens
tagagaaattactatgagaggatcgcatcaccatcaccatcacggatcctatttaggtgacactatagaatcgtcgacccacgcgtccgaagcggagttcgatgcgtttgcacaagagctggaggagctgacaagcacaagtgtggaacacatcattgtcaatcctaatgctgcctatgacaagttcaaggacaagagagtggggacaaagggacttgatttctcagatcgtattggaaaaaccaagaggacagga

SEQ ID NO: 73 - DNA, 1352 bp, Homo Sapiens
  misc_feature (722)..(722): n is a, c, g, or t
  misc_feature (780)..(780): n is a, c, g, or t
  misc_feature (791)..(791): n is a, c, g, or t
  misc_feature (796)..(796): n is a, c, g, or t
  misc_feature (800)..(800): n is a, c, g, or t
  misc_feature (807)..(807): n is a, c, g, or t
  misc_feature (815)..(815): n is a, c, g, or t
  misc_feature (832)..(832): n is a, c, g, or t
  misc_feature (841)..(841): n is a, c, g, or t
  misc_feature (858)..(858): n is a, c, g, or t
  misc_feature (868)..(868): n is a, c, g, or t
  misc_feature (878)..(879): n is a, c, g, or t
  misc_feature (912)..(912): n is a, c, g, or t
  misc_feature (920)..(920): n is a, c, g, or t
  misc_feature (922)..(922): n is a, c, g, or t
  misc_feature (927)..(927): n is a, c, g, or t
  misc_feature (930)..(930): n is a, c, g, or t
  misc_feature (934)..(934): n is a, c, g, or t
  misc_feature (945)..(945): n is a, c, g, or t
  misc_feature (947)..(947): n is a, c, g, or t
  misc_feature (950)..(951): n is a, c, g, or t
  misc_feature (953)..(953): n is a, c, g, or t
  misc_feature (955)..(955): n is a, c, g, or t
  misc_feature (962)..(962): n is a, c, g, or t
  misc_feature (964)..(964): n is a, c, g, or t
  misc_feature (982)..(982): n is a, c, g, or t
  misc_feature (985)..(985): n is a, c, g, or t
  misc_feature (1008)..(1008): n is a, c, g, or t
  misc_feature (1026)..(1026): n is a, c, g, or t
  misc_feature (1032)..(1032): n is a, c, g, or t
  misc_feature (1035)..(1035): n is a, c, g, or t
  misc_feature (1039)..(1039): n is a, c, g, or t
  misc_feature (1046)..(1046): n is a, c, g, or t
  misc_feature (1050)..(1051): n is a, c, g, or t
  misc_feature (1061)..(1061): n is a, c, g, or t
  misc_feature (1069)..(1069): n is a, c, g, or t
  misc_feature (1078)..(1078): n is a, c, g, or t
  misc_feature (1081)..(1081): n is a, c, g, or t
  misc_feature (1083)..(1083): n is a, c, g, or t
  misc_feature (1089)..(1089): n is a, c, g, or t
  misc_feature (1098)..(1098): n is a, c, g, or t
  misc_feature (1101)..(1101): n is a, c, g, or t
  misc_feature (1114)..(1115): n is a, c, g, or t
  misc_feature (1124)..(1124): n is a, c, g, or t
  misc_feature (1138)..(1138): n is a, c, g, or t
  misc_feature (1141)..(1142): n is a, c, g, or t
  misc_feature (1149)..(1149): n is a, c, g, or t
  misc_feature (1153)..(1153): n is a, c, g, or t
  misc_feature (1164)..(1164): n is a, c, g, or t
  misc_feature (1166)..(1166): n is a, c, g, or t
  misc_feature (1175)..(1176): n is a, c, g, or t
  misc_feature (1189)..(1190): n is a, c, g, or t
  misc_feature (1192)..(1192): n is a, c, g, or t
  misc_feature (1195)..(1200): n is a, c, g, or t
  misc_feature (1203)..(1204): n is a, c, g, or t
  misc_feature (1207)..(1214): n is a, c, g, or t
  misc_feature (1217)..(1224): n is a, c, g, or t
  misc_feature (1228)..(1229): n is a, c, g, or t
  misc_feature (1233)..(1234): n is a, c, g, or t
  misc_feature (1252)..(1252): n is a, c, g, or t
  misc_feature (1255)..(1255): n is a, c, g, or t
  misc_feature (1261)..(1262): n is a, c, g, or t
  misc_feature (1265)..(1265): n is a, c, g, or t
  misc_feature (1277)..(1277): n is a, c, g, or t
  misc_feature (1281)..(1281): n is a, c, g, or t
  misc_feature (1284)..(1284): n is a, c, g, or t
  misc_feature (1293)..(1293): n is a, c, g, or t
  misc_feature (1314)..(1314): n is a, c, g, or t
  misc_feature (1328)..(1329): n is a, c, g, or t
  misc_feature (1332)..(1332): n is a, c, g, or t
  misc_feature (1343)..(1343): n is a, c, g, or t
  misc_feature (1347)..(1347): n is a, c, g, or t
  misc_feature (1350)..(1350): n is a, c, g, or t
attagagaaattactatgagaggatcgcatcaccatcaccatcacggatcctatttaggtgacactatagaatcgtcgacccacgcgtccgaaatggaagtgtgggatgtgaaaaactacaaacttatttctaaaccggtggcttctgattctacatattttgcttggtgcccggatggtgagcatattttaacagctacatgtgctcccaggttacgggttaataatggatacaaaatttggcattatactggctctatcttgcacaagtatgatgtgccatcaaatgcagaattatggcaggtttcttggcagccatttttggatggaatatttccagcaaaaacaataacttaccaagcagttccaagtgaagtacccaatgaggaacctaaagttgcaacagcttatagacccccagctttaagaaataaaccaatcaccaattccaaattgcatgaagaggaaccacctcagaatatgaaaccacaatcaggaaacgataagccattatcaaaaacagctcttaaaaatcaaaggaagcatgaagctaagaaagctgcaaagcaggaagcaagaagtgacaagagtccagatttggcacctactcctgccccacagagcacaccacgaaacactgtctctcagtcaatttctggggaccctgagatagacaaaaaaattccagaacctaaaggaagaaactgaaagcaatcgaacanctgaaagaacaagcagcaactggaaaacagctagaaaaaaatcagttgggaaaaaatncaaaaagaacngcccnttcnccagganctgggaanaatttggaattgggtantttaaaganttcccgggaaagcaagnttgatgaccnaaaaatccgnngcaaaccccctccttcgggtaaacccctttggnaaacccananaattnccngggnccccccttaangnccnncnanaattttnanccctttttcccaaaatcnccnaaaggggaaaaattttttaaaanggccctttaaaatggaantttttnccntggnccccccnaaanngggccaaaangggaaaanaaaaaaaanaancncggaanttttttacncancctggccaaattnnaaaaaaagngttctttttttttnggnnggggggnaatnaaccccggganangaaaaaaannctttttttttttnnanaannnnnnaannaannnnnnnnaannnnnnnnaagnngggnncccccccccctggggggncanaaaccnnttnaccggcggggcncccnggnaaaccccanggcccccccaccccccggttntttcaacccccggnnccncgggttttttntggnaancc

SEQ ID NO: 74 - DNA, 1200 bp, Homo Sapiens
  misc_feature (920)..(920): n is a, c, g, or t
  misc_feature (950)..(950): n is a, c, g, or t
  misc_feature (988)..(988): n is a, c, g, or t
  misc_feature (996)..(996): n is a, c, g, or t
  misc_feature (1034)..(1034): n is a, c, g, or t
  misc_feature (1036)..(1036): n is a, c, g, or t
  misc_feature (1038)..(1038): n is a, c, g, or t
  misc_feature (1042)..(1042): n is a, c, g, or t
  misc_feature (1044)..(1044): n is a, c, g, or t
  misc_feature (1053)..(1053): n is a, c, g, or t
  misc_feature (1062)..(1063): n is a, c, g, or t
  misc_feature (1070)..(1070): n is a, c, g, or t
  misc_feature (1073)..(1073): n is a, c, g, or t
  misc_feature (1077)..(1077): n is a, c, g, or t
  misc_feature (1080)..(1080): n is a, c, g, or t
  misc_feature (1085)..(1085): n is a, c, g, or t
  misc_feature (1097)..(1098): n is a, c, g, or t
  misc_feature (1105)..(1105): n is a, c, g, or t
  misc_feature (1124)..(1124): n is a, c, g, or t
  misc_feature (1130)..(1130): n is a, c, g, or t
  misc_feature (1137)..(1137): n is a, c, g, or t
  misc_feature (1141)..(1141): n is a, c, g, or t
  misc_feature (1145)..(1145): n is a, c, g, or t
  misc_feature (1148)..(1148): n is a, c, g, or t
  misc_feature (1154)..(1154): n is a, c, g, or t
  misc_feature (1164)..(1164): n is a, c, g, or t
  misc_feature (1174)..(1174): n is a, c, g, or t
  misc_feature (1178)..(1178): n is a, c, g, or t
  misc_feature (1182)..(1182): n is a, c, g, or t
  misc_feature (1190)..(1190): n is a, c, g, or t
tagagaaaattactatgagaggatcgcatcaccatcaccatcacggatcctatttaggtgacactatagaatcgtcgacccacgcgtccgcatccaaacccctgacagccctgtcagataagagaccaaactatggggaaatccctgttcaagagcatctgttaagaacatcttcagccagccggcctgcttccctgccaagagtgcctgcgatggaaagtgccaagaccctctcagtgtctcgacgaagtagtgaagaaatgaaacgggacatttctgcacaggagggagcgtcgccagcctctctgatggctatgggaaccacgtctccacagctttccctgtcctcttctccaacggcatctgtgactcccaccacccgaagccgaataagagaagaaaggaaagaccctctctcagcattggccagagaatatggaggatcaaagaggaacgccttgctgaagtggtgtcagaagaaaacagaaggctatcagaatattgacattacaaacttcagcagcagctggaatgatgggctggccttctgtgccctcctgcatacatatctccctgcccacattccatatcaagaactgaacagccaggataagagaaggaacttcatgctggctttccaggcagctgaaagtgtcggcatcaaatccacactggacattaatgaaatggtacggactgaacgacccgactggcagaacgtgatgctgtatgtgacggcgatctacaagtactttgagacctgagcatgccgggaggagccgccccaatagcgggggtacccctccacagcgaccgagcgacaccgacgccattagctacgcacccctgtaaagcttccagcaactctgggctgcccccacagcgtgtgagcctccagctcggggcttccgtattggaanaactcagccgtggggcccacagctcccacnagggcccctcccacatgacccgtccattcaggtcatgngggctcancaaacatcctgcaggccgggggctgctggaattttccntntngaananaatattganctaccctanngctcccnggncccnaanaaaangggctcttgccnngctgaantttgggaaaagggattccnttctgnggggaancccnctanggnttaaanaaaggctcgnccccggcccnttcnggantattgggntggggggggt

SEQ ID NO: 75 - DNA, 1444 bp, Homo Sapiens
  misc_feature (64)..(64): n is a, c, g, or t
  misc_feature (110)..(110): n is a, c, g, or t
  misc_feature (123)..(123): n is a, c, g, or t
  misc_feature (126)..(126): n is a, c, g, or t
  misc_feature (128)..(128): n is a, c, g, or t
  misc_feature (169)..(169): n is a, c, g, or t
  misc_feature (185)..(185): n is a, c, g, or t
  misc_feature (193)..(193): n is a, c, g, or t
  misc_feature (247)..(247): n is a, c, g, or t
  misc_feature (262)..(262): n is a, c, g, or t
  misc_feature (267)..(267): n is a, c, g, or t
  misc_feature (269)..(269): n is a, c, g, or t
  misc_feature (297)..(297): n is a, c, g, or t
  misc_feature (373)..(373): n is a, c, g, or t
  misc_feature (381)..(381): n is a, c, g, or t
  misc_feature (451)..(451): n is a, c, g, or t
  misc_feature (480)..(480): n is a, c, g, or t
  misc_feature (501)..(501): n is a, c, g, or t
  misc_feature (507)..(507): n is a, c, g, or t
  misc_feature (552)..(552): n is a, c, g, or t
  misc_feature (612)..(612): n is a, c, g, or t
  misc_feature (650)..(650): n is a, c, g, or t
  misc_feature (666)..(666): n is a, c, g, or t
  misc_feature (693)..(693): n is a, c, g, or t
  misc_feature (710)..(710): n is a, c, g, or t
  misc_feature (752)..(752): n is a, c, g, or t
  misc_feature (766)..(766): n is a, c, g, or t
  misc_feature (775)..(775): n is a, c, g, or t
  misc_feature (791)..(791): n is a, c, g, or t
  misc_feature (799)..(799): n is a, c, g, or t
  misc_feature (805)..(805): n is a, c, g, or t
  misc_feature (824)..(824): n is a, c, g, or t
  misc_feature (831)..(831): n is a, c, g, or t
  misc_feature (837)..(837): n is a, c, g, or t
  misc_feature (844)..(845): n is a, c, g, or t
  misc_feature (847)..(847): n is a, c, g, or t
  misc_feature (855)..(855): n is a, c, g, or t
  misc_feature (866)..(866): n is a, c, g, or t
  misc_feature (868)..(868): n is a, c, g, or t
  misc_feature (874)..(877): n is a, c, g, or t
  misc_feature (891)..(891): n is a, c, g, or t
  misc_feature (913)..(914): n is a, c, g, or t
  misc_feature (918)..(919): n is a, c, g, or t
  misc_feature (939)..(939): n is a, c, g, or t
  misc_feature (942)..(943): n is a, c, g, or t
  misc_feature (953)..(955): n is a, c, g, or t
  misc_feature (958)..(958): n is a, c, g, or t
  misc_feature (966)..(966): n is a, c, g, or t
  misc_feature (978)..(978): n is a, c, g, or t
  misc_feature (982)..(983): n is a, c, g, or t
  misc_feature (989)..(989): n is a, c, g, or t
  misc_feature (996)..(998): n is a, c, g, or t
  misc_feature (1002)..(1002): n is a, c, g, or t
  misc_feature (1007)..(1007): n is a, c, g, or t
  misc_feature (1010)..(1010): n is a, c, g, or t
  misc_feature (1013)..(1013): n is a, c, g, or t
  misc_feature (1018)..(1018): n is a, c, g, or t
  misc_feature (1021)..(1021): n is a, c, g, or t
  misc_feature (1031)..(1032): n is a, c, g, or t
  misc_feature (1044)..(1044): n is a, c, g, or t
  misc_feature (1055)..(1055): n is a, c, g, or t
  misc_feature (1058)..(1058): n is a, c, g, or t
  misc_feature (1062)..(1062): n is a, c, g, or t
  misc_feature (1067)..(1067): n is a, c, g, or t
  misc_feature (1073)..(1073): n is a, c, g, or t
  misc_feature (1075)..(1075): n is a, c, g, or t
  misc_feature (1082)..(1082): n is a, c, g, or t
  misc_feature (1086)..(1086): n is a, c, g, or t
  misc_feature (1093)..(1093): n is a, c, g, or t
  misc_feature (1101)..(1102): n is a, c, g, or t
  misc_feature (1109)..(1109): n is a, c, g, or t
  misc_feature (1112)..(1112): n is a, c, g, or t
  misc_feature (1119)..(1119): n is a, c, g, or t
  misc_feature (1124)..(1125): n is a, c, g, or t
  misc_feature (1127)..(1127): n is a, c, g, or t
  misc_feature (1132)..(1132): n is a, c, g, or t
  misc_feature (1138)..(1138): n is a, c, g, or t
  misc_feature (1147)..(1147): n is a, c, g, or t
  misc_feature (1152)..(1152): n is a, c, g, or t
  misc_feature (1172)..(1172): n is a, c, g, or t
  misc_feature (1184)..(1184): n is a, c, g, or t
  misc_feature (1186)..(1186): n is a, c, g, or t
  misc_feature (1195)..(1195): n is a, c, g, or t
  misc_feature (1199)..(1199): n is a, c, g, or t
  misc_feature (1204)..(1204): n is a, c, g, or t
  misc_feature (1206)..(1206): n is a, c, g, or t
  misc_feature (1208)..(1209): n is a, c, g, or t
  misc_feature (1211)..(1211): n is a, c, g, or t
  misc_feature (1215)..(1216): n is a, c, g, or t
  misc_feature (1218)..(1218): n is a, c, g, or t
  misc_feature (1220)..(1220): n is a, c, g, or t
  misc_feature (1235)..(1235): n is a, c, g, or t
  misc_feature (1274)..(1274): n is a, c, g, or t
  misc_feature (1278)..(1278): n is a, c, g, or t
  misc_feature (1280)..(1280): n is a, c, g, or t
  misc_feature (1284)..(1284): n is a, c, g, or t
  misc_feature (1288)..(1289): n is a, c, g, or t
  misc_feature (1297)..(1297): n is a, c, g, or t
  misc_feature (1299)..(1299): n is a, c, g, or t
  misc_feature (1301)..(1301): n is a, c, g, or t
  misc_feature (1303)..(1303): n is a, c, g, or t
  misc_feature (1309)..(1309): n is a, c, g, or t
  misc_feature (1316)..(1316): n is a, c, g, or t
  misc_feature (1319)..(1319): n is a, c, g, or t
  misc_feature (1321)..(1321): n is a, c, g, or t
  misc_feature (1329)..(1330): n is a, c, g, or t
  misc_feature (1339)..(1339): n is a, c, g, or t
  misc_feature (1342)..(1342): n is a, c, g, or t
  misc_feature (1346)..(1346): n is a, c, g, or t
  misc_feature (1349)..(1349): n is a, c, g, or t
  misc_feature (1351)..(1351): n is a, c, g, or t
  misc_feature (1362)..(1363): n is a, c, g, or t
  misc_feature (1373)..(1373): n is a, c, g, or t
  misc_feature (1380)..(1380): n is a, c, g, or t
  misc_feature (1388)..(1389): n is a, c, g, or t
  misc_feature (1391)..(1391): n is a, c, g, or t
  misc_feature (1401)..(1401): n is a, c, g, or t
  misc_feature (1405)..(1405): n is a, c, g, or t
  misc_feature (1409)..(1409): n is a, c, g, or t
  misc_feature (1411)..(1412): n is a, c, g, or t
  misc_feature (1417)..(1418): n is a, c, g, or t
  misc_feature (1427)..(1427): n is a, c, g, or t
  misc_feature (1431)..(1432): n is a, c, g, or t
  misc_feature (1438)..(1438): n is a, c, g, or t
  misc_feature (1440)..(1440): n is a, c, g, or t
  misc_feature (1443)..(1444): n is a, c, g, or t
attagagagaattactatgagaggatcgcatccccatcaccatcacggatcctatttaggtganactatagaatcgtcgacccacgcgtccggtggcattaaagaagacnctgaagaacttcnccnangagattattttgaacagtatggaaaaattgaagtgattganatcatgactgaccgangcagtggnaagaaaaggggctttgcctttgtaacctttgacgaccatgactccgtggataanattgtcattcagaantaccntnctgtgaatggccacaactgtgaagttanaaaagccctgtcaaagcaagagatggctagtgcttcatccagccaaagaggtcgaagtggttctggaaactttggnggaggtcntggaggtggtttcggtgggaatgacaacttcggtcgtggaggaaacttcagtggtcgtggtggctttggnggcagccgtggtggtggtggatatggtgncagtggggatggctataatgnatttgntaatgatggtggttatggaggaggcggccctggttactctggagnaagcagaggctatggaagtggtggacagggttatggaaaccagggcagtggctatggcgngagtggcagctatgacagctataacaacggaggcggangcggctttggcggtgntagtgcaagcaattttggagttggtgnaagctacaatgattttnggaattacaaacaatcagtcttcaaattttggacccatgaanggaggaaattttgnaggcaaaanctctggcccctatggnggttggangccaanactttgcaaaaaccacaanacccaanttggcnatgggcnnantcccagcnacccgcagtancnatggcnnnnggccagaacatttnaatttaggaaacaaaagccttnncatnnaaaaggagaccccccaaaantgnncagggaaacnnncangtttacanaccgaatttgtnaacnnctcccnaccacannnggtngccanggnccnaactnctncaaaaaaaanntggtttttaaanccaaaaccccnttngcangggcnaaaaantnccaggantgtntttgggnactatttnnaatacanggnttttttnaattnntntccgnggaaangttaaaccnttccnccaaggggtttaaaggaaantttttttttttncnccccagcgnttanttccnanannanaaanntncncgaacgtcaaaaaantttttttttaaaaaaaaaaaaaaggccccccccccttanggangnaaancttnnctcctcanangncnccttgnaacccanaancncacaaccnntgtttttanaanccgnccncngcactttttgnnaacccccttnggatttngatctcannanagaaaaaacngaancccncnnacccnnccaaatttnttcnnccttcncnaann

SEQ ID NO: 76 - DNA, 256 bp, Homo Sapiens
ttaactatgagaggatcgcatcaccatcaccatcacggatcctatttaggtgacactatagaatcgtcgacccacgcgtccgcccacgcgtccggtcggccagaggctgtatcgcatccattgaatactgtgaccgaggacatgtacaccaacgggtctcctgccccaggtagccctgcccaggtcaagggacaggaggtgcggaaagtgcgactcatacagtttgagaaggtcacagaagagcccatgggaatca

SEQ ID NO: 77 - DNA, 256 bp, Homo Sapiens
ccacgcgtccggccatggcggccagcggggctgtggaaccagggcccccgggggctgccgtcgccccgtcgcccgccccggccccgccgcctgcccctgatcacctgttccggcccatcagcgccgaggacgaggagcagcagcccaccgagatcgagtcgctatgcatgaactgttactgcaatggcatgacgcgcctcctgctcaccaagattcccttcttcagagaaataatagtgagctccttttcctgcga

SEQ ID NO: 78 - DNA, 1496 bp, Homo Sapiens
  misc_feature (1)..(10): n is a, c, g, or t
  misc_feature (12)..(12): n is a, c, g, or t
  misc_feature (15)..(15): n is a, c, g, or t
  misc_feature (25)..(25): n is a, c, g, or t
  misc_feature (29)..(29): n is a, c, g, or t
  misc_feature (74)..(74): n is a, c, g, or t
  misc_feature (82)..(82): n is a, c, g, or t
  misc_feature (93)..(93): n is a, c, g, or t
  misc_feature (107)..(107): n is a, c, g, or t
  misc_feature (128)..(128): n is a, c, g, or t
  misc_feature (141)..(141): n is a, c, g, or t
  misc_feature (855)..(855): n is a, c, g, or t
  misc_feature (864)..(864): n is a, c, g, or t
  misc_feature (877)..(877): n is a, c, g, or t
  misc_feature (887)..(887): n is a, c, g, or t
  misc_feature (896)..(896): n is a, c, g, or t
  misc_feature (924)..(924): n is a, c, g, or t
  misc_feature (944)..(944): n is a, c, g, or t
  misc_feature (950)..(950): n is a, c, g, or t
  misc_feature (962)..(962): n is a, c, g, or t
  misc_feature (974)..(974): n is a, c, g, or t
  misc_feature (977)..(977): n is a, c, g, or t
  misc_feature (1040)..(1040): n is a, c, g, or t
  misc_feature (1056)..(1056): n is a, c, g, or t
  misc_feature (1068)..(1068): n is a, c, g, or t
  misc_feature (1070)..(1070): n is a, c, g, or t
  misc_feature (1083)..(1083): n is a, c, g, or t
  misc_feature (1090)..(1090): n is a, c, g, or t
  misc_feature (1099)..(1099): n is a, c, g, or t
  misc_feature (1106)..(1106): n is a, c, g, or t
  misc_feature (1112)..(1112): n is a, c, g, or t
  misc_feature (1117)..(1117): n is a, c, g, or t
  misc_feature (1120)..(1120): n is a, c, g, or t
  misc_feature (1130)..(1130): n is a, c, g, or t
  misc_feature (1141)..(1141): n is a, c, g, or t
  misc_feature (1147)..(1147): n is a, c, g, or t
  misc_feature (1154)..(1154): n is a, c, g, or t
  misc_feature (1156)..(1156): n is a, c, g, or t
  misc_feature (1179)..(1179): n is a, c, g, or t
  misc_feature (1184)..(1184): n is a, c, g, or t
  misc_feature (1190)..(1190): n is a, c, g, or t
  misc_feature (1193)..(1193): n is a, c, g, or t
  misc_feature (1198)..(1198): n is a, c, g, or t
  misc_feature (1205)..(1205): n is a, c, g, or t
  misc_feature (1225)..(1225): n is a, c, g, or t
  misc_feature (1235)..(1235): n is a, c, g, or t
  misc_feature (1241)..(1241): n is a, c, g, or t
  misc_feature (1247)..(1247): n is a, c, g, or t
  misc_feature (1249)..(1249): n is a, c, g, or t
  misc_feature (1259)..(1260): n is a, c, g, or t
  misc_feature (1264)..(1264): n is a, c, g, or t
  misc_feature (1272)..(1273): n is a, c, g, or t
  misc_feature (1306)..(1306): n is a, c, g, or t
  misc_feature (1310)..(1311): n is a, c, g, or t
  misc_feature (1328)..(1330): n is a, c, g, or t
  misc_feature (1338)..(1338): n is a, c, g, or t
  misc_feature (1346)..(1346): n is a, c, g, or t
  misc_feature (1352)..(1352): n is a, c, g, or t
  misc_feature (1354)..(1354): n is a, c, g, or t
  misc_feature (1363)..(1363): n is a, c, g, or t
  misc_feature (1371)..(1371): n is a, c, g, or t
  misc_feature (1373)..(1373): n is a, c, g, or t
  misc_feature (1378)..(1378): n is a, c, g, or t
  misc_feature (1398)..(1398): n is a, c, g, or t
  misc_feature (1402)..(1408): n is a, c, g, or t
  misc_feature (1410)..(1410): n is a, c, g, or t
  misc_feature (1414)..(1414): n is a, c, g, or t
  misc_feature (1422)..(1423): n is a, c, g, or t
  misc_feature (1425)..(1425): n is a, c, g, or t
  misc_feature (1427)..(1429): n is a, c, g, or t
  misc_feature (1431)..(1431): n is a, c, g, or t
  misc_feature (1433)..(1434): n is a, c, g, or t
  misc_feature (1436)..(1436): n is a, c, g, or t
  misc_feature (1438)..(1438): n is a, c, g, or t
  misc_feature (1440)..(1441): n is a, c, g, or t
  misc_feature (1443)..(1445): n is a, c, g, or t
  misc_feature (1452)..(1452): n is a, c, g, or t
  misc_feature (1458)..(1459): n is a, c, g, or t
  misc_feature (1463)..(1463): n is a, c, g, or t
  misc_feature (1467)..(1470): n is a, c, g, or t
  misc_feature (1472)..(1473): n is a, c, g, or t
  misc_feature (1476)..(1478): n is a, c, g, or t
  misc_feature (1480)..(1481): n is a, c, g, or t
  misc_feature (1495)..(1495): n is a, c, g, or t
nnnnnnnnnngnatngagaaaattnctangagagggatgcatcaccatcaccattcacgggatcctatttaggntggacacntatagaatcgntcgacccacgccgntccgcccacgcgcccacgcgntccgcccacgcgntccgggcgagcagaactacggcgagcgggaatcccgttctgcttccagaagtggaagtgctcacggatcggggaaatctgcaaggcatacccctgcaaggtctcgctccaaggaagattccaggcgttccagatcaaagtccaggtcccgatctgaatctaggtctagatccagaagaagctcccgaaggcattatacccggtcacggtctcgctcccgctcccatagacgatcacgtagcaggtcttacagtcgagattatcgtagacggcacagccacagccattctcccatgtctactcgcaggcgtcatgttgggaatcgggcaaatcctgatcctaactgttgtcttggagtatttgggctgagcttgtacaccacagaaagagatctaagagaagtgttctctaaatatggtcccattgccgatgtgtctattgtatatgaccagcagtctaggcgttcaagaggatttgcctttgtatattttgaaaatgtagatgatgccaaggaagctaaagaacgtgccaatggaatggagcttgatgggcgtaggatcagagttgatttctctataacaaaaagaccacatacgccaacaccaggaatttacatggggagacctacctatggcagctctcgccgtcgggattactatgacagaggatatgatcggggctatgatgatcgggactactatagcagatcatacanaaggaggangtggaggaaggangaggatgganagctgcccnaaaacagggatcaaaatttatagaaggnggtcaccttctccttactanagtcgngggaggatacanatcacgttccanatntcgatcatacttcacctcgtcccttataaaagcatgaaaaacttttctgaaaacctgccctanaagcttggaaatttgntttgggggcaanantttttttattgtncccttgnttaaaaagngaaacantggccnaaggnaantttaggggantttttacaccnttttanaaaagantnacttttggggggaagttgaaaanggcgnttttcnttncggcnttttggngaaatttggggctttgttcnaaataaaggntttttnaaaaanantgttttggcnngganttttttanncccaaaattttaaggggggaaaatttttttttnaaannttttttaaaaggttttnnntaaacccnggtttttnaaaaananccggtaaantctccagngnaaaanccaaaaaattttttttttanaaannnnnnnanatanaaataaanntnannnanannanananntnnnaaaaggngccccnnaagnaaannnnannggnnntnnaaaaaaaccaaatnt

SEQ ID NO: 79 - DNA, 1449 bp, Homo Sapiens
  misc_feature (6)..(7): n is a, c, g, or t
  misc_feature (14)..(14): n is a, c, g, or t
  misc_feature (260)..(260): n is a, c, g, or t
  misc_feature (265)..(265): n is a, c, g, or t
  misc_feature (360)..(360): n is a, c, g, or t
  misc_feature (362)..(362): n is a, c, g, or t
  misc_feature (375)..(375): n is a, c, g, or t
  misc_feature (384)..(384): n is a, c, g, or t
  misc_feature (389)..(389): n is a, c, g, or t
  misc_feature (391)..(391): n is a, c, g, or t
  misc_feature (410)..(410): n is a, c, g, or t
  misc_feature (415)..(415): n is a, c, g, or t
  misc_feature (417)..(417): n is a, c, g, or t
  misc_feature (443)..(443): n is a, c, g, or t
  misc_feature (457)..(457): n is a, c, g, or t
  misc_feature (462)..(462): n is a, c, g, or t
  misc_feature (470)..(470): n is a, c, g, or t
  misc_feature (483)..(483): n is a, c, g, or t
  misc_feature (491)..(491): n is a, c, g, or t
  misc_feature (515)..(515): n is a, c, g, or t
  misc_feature (521)..(521): n is a, c, g, or t
  misc_feature (526)..(527): n is a, c, g, or t
  misc_feature (538)..(538): n is a, c, g, or t
  misc_feature (544)..(544): n is a, c, g, or t
  misc_feature (548)..(548): n is a, c, g, or t
  misc_feature (587)..(587): n is a, c, g, or t
  misc_feature (590)..(590): n is a, c, g, or t
  misc_feature (598)..(599): n is a, c, g, or t
  misc_feature (614)..(614): n is a, c, g, or t
  misc_feature (620)..(620): n is a, c, g, or t
  misc_feature (627)..(627): n is a, c, g, or t
  misc_feature (634)..(636): n is a, c, g, or t
  misc_feature (638)..(638): n is a, c, g, or t
  misc_feature (643)..(643): n is a, c, g, or t
  misc_feature (651)..(651): n is a, c, g, or t
  misc_feature (664)..(664): n is a, c, g, or t
  misc_feature (676)..(676): n is a, c, g, or t
  misc_feature (679)..(679): n is a, c, g, or t
  misc_feature (686)..(687): n is a, c, g, or t
  misc_feature (694)..(694): n is a, c, g, or t
  misc_feature (709)..(709): n is a, c, g, or t
  misc_feature (722)..(722): n is a, c, g, or t
  misc_feature (727)..(727): n is a, c, g, or t
  misc_feature (731)..(731): n is a, c, g, or t
  misc_feature (739)..(739): n is a, c, g, or t
  misc_feature (742)..(742): n is a, c, g, or t
  misc_feature (744)..(744): n is a, c, g, or t
  misc_feature (748)..(748): n is a, c, g, or t
  misc_feature (762)..(762): n is a, c, g, or t
  misc_feature (765)..(768): n is a, c, g, or t
  misc_feature (775)..(775): n is a, c, g, or t
  misc_feature (777)..(777): n is a, c, g, or t
  misc_feature (783)..(783): n is a, c, g, or t
  misc_feature (791)..(791): n is a, c, g, or t
  misc_feature (795)..(795): n is a, c, g, or t
  misc_feature (803)..(803): n is a, c, g, or t
  misc_feature (813)..(815): n is a, c, g, or t
  misc_feature (821)..(821): n is a, c, g, or t
  misc_feature (823)..(823): n is a, c, g, or t
  misc_feature (828)..(829): n is a, c, g, or t
  misc_feature (834)..(834): n is a, c, g, or t
  misc_feature (839)..(839): n is a, c, g, or t
  misc_feature (842)..(842): n is a, c, g, or t
  misc_feature (851)..(852): n is a, c, g, or t
  misc_feature (854)..(854): n is a, c, g, or t
  misc_feature (856)..(856): n is a, c, g, or t
  misc_feature (863)..(863): n is a, c, g, or t
  misc_feature (865)..(865): n is a, c, g, or t
  misc_feature (868)..(868): n is a, c, g, or t
  misc_feature (871)..(871): n is a, c, g, or t
  misc_feature (896)..(897): n is a, c, g, or t
  misc_feature (900)..(900): n is a, c, g, or t
  misc_feature (904)..(904): n is a, c, g, or t
  misc_feature (906)..(906): n is a, c, g, or t
  misc_feature (912)..(912): n is a, c, g, or t
  misc_feature (914)..(914): n is a, c, g, or t
  misc_feature (917)..(917): n is a, c, g, or t
  misc_feature (920)..(920): n is a, c, g, or t
  misc_feature (923)..(923): n is a, c, g, or t
  misc_feature (931)..(931): n is a, c, g, or t
  misc_feature (934)..(935): n is a, c, g, or t
  misc_feature (937)..(937): n is a, c, g, or t
  misc_feature (941)..(942): n is a, c, g, or t
  misc_feature (948)..(948): n is a, c, g, or t
  misc_feature (951)..(951): n is a, c, g, or t
  misc_feature (955)..(955): n is a, c, g, or t
  misc_feature (965)..(965): n is a, c, g, or t
  misc_feature (976)..(976): n is a, c, g, or t
  misc_feature (979)..(979): n is a, c, g, or t
  misc_feature (981)..(981): n is a, c, g, or t
  misc_feature (984)..(984): n is a, c, g, or t
  misc_feature (1004)..(1004): n is a, c, g, or t
  misc_feature (1016)..(1016): n is a, c, g, or t
  misc_feature (1023)..(1025): n is a, c, g, or t
  misc_feature (1027)..(1027): n is a, c, g, or t
  misc_feature (1032)..(1032): n is a, c, g, or t
  misc_feature (1034)..(1034): n is a, c, g, or t
  misc_feature (1040)..(1040): n is a, c, g, or t
  misc_feature (1046)..(1046): n is a, c, g, or t
  misc_feature (1049)..(1049): n is a, c, g, or t
  misc_feature (1053)..(1053): n is a, c, g, or t
  misc_feature (1055)..(1055): n is a, c, g, or t
  misc_feature (1057)..(1057): n is a, c, g, or t
  misc_feature (1061)..(1063): n is a, c, g, or t
  misc_feature (1065)..(1065): n is a, c, g, or t
  misc_feature (1068)..(1068): n is a, c, g, or t
  misc_feature (1070)..(1070): n is a, c, g, or t
  misc_feature (1072)..(1072): n is a, c, g, or t
  misc_feature (1075)..(1076): n is a, c, g, or t
  misc_feature (1082)..(1082): n is a, c, g, or t
  misc_feature (1085)..(1085): n is a, c, g, or t
  misc_feature (1088)..(1088): n is a, c, g, or t
  misc_feature (1090)..(1090): n is a, c, g, or t
  misc_feature (1096)..(1096): n is a, c, g, or t
  misc_feature (1102)..(1102): n is a, c, g, or t
  misc_feature (1111)..(1111): n is a, c, g, or t
  misc_feature (1115)..(1115): n is a, c, g, or t
  misc_feature (1121)..(1121): n is a, c, g, or t
  misc_feature (1135)..(1135): n is a, c, g, or t
  misc_feature (1140)..(1141): n is a, c, g, or t
  misc_feature (1143)..(1145): n is a, c, g, or t
  misc_feature (1148)..(1148): n is a, c, g, or t
  misc_feature (1155)..(1155): n is a, c, g, or t
  misc_feature (1173)..(1173): n is a, c, g, or t
  misc_feature (1177)..(1178): n is a, c, g, or t
  misc_feature (1180)..(1181): n is a, c, g, or t
  misc_feature (1183)..(1186): n is a, c, g, or t
  misc_feature (1189)..(1190): n is a, c, g, or t
  misc_feature (1204)..(1204): n is a, c, g, or t
  misc_feature (1207)..(1207): n is a, c, g, or t
  misc_feature (1211)..(1211): n is a, c, g, or t
  misc_feature (1214)..(1214): n is a, c, g, or t
  misc_feature (1217)..(1217): n is a, c, g, or t
  misc_feature (1219)..(1219): n is a, c, g, or t
  misc_feature (1223)..(1223): n is a, c, g, or t
  misc_feature (1228)..(1228): n is a, c, g, or t
  misc_feature (1231)..(1231): n is a, c, g, or t
  misc_feature (1239)..(1239): n is a, c, g, or t
  misc_feature (1242)..(1242): n is a, c, g, or t
  misc_feature (1246)..(1247): n is a, c, g, or t
  misc_feature (1249)..(1250): n is a, c, g, or t
  misc_feature (1252)..(1253): n is a, c, g, or t
  misc_feature (1259)..(1260): n is a, c, g, or t
  misc_feature (1268)..(1268): n is a, c, g, or t
  misc_feature (1271)..(1271): n is a, c, g, or t
  misc_feature (1274)..(1274): n is a, c, g, or t
  misc_feature (1280)..(1280): n is a, c, g, or t
  misc_feature (1284)..(1284): n is a, c, g, or t
  misc_feature (1295)..(1295): n is a, c, g, or t
  misc_feature (1301)..(1301): n is a, c, g, or t
  misc_feature (1306)..(1307): n is a, c, g, or t
  misc_feature (1309)..(1309): n is a, c, g, or t
  misc_feature (1314)..(1314): n is a, c, g, or t
  misc_feature (1317)..(1317): n is a, c, g, or t
  misc_feature (1319)..(1319): n is a, c, g, or t
  misc_feature (1325)..(1325): n is a, c, g, or t
  misc_feature (1329)..(1329): n is a, c, g, or t
  misc_feature (1333)..(1333): n is a, c, g, or t
  misc_feature (1336)..(1337): n is a, c, g, or t
  misc_feature (1340)..(1341): n is a, c, g, or t
  misc_feature (1344)..(1344): n is a, c, g, or t
  misc_feature (1349)..(1349): n is a, c, g, or t
  misc_feature (1352)..(1352): n is a, c, g, or t
  misc_feature (1355)..(1355): n is a, c, g, or t
  misc_feature (1358)..(1358): n is a, c, g, or t
  misc_feature (1361)..(1361): n is a, c, g, or t
  misc_feature (1363)..(1363): n is a, c, g, or t
  misc_feature (1371)..(1371): n is a, c, g, or t
  misc_feature (1373)..(1373): n is a, c, g, or t
  misc_feature (1381)..(1383): n is a, c, g, or t
  misc_feature (1390)..(1390): n is a, c, g, or t
  misc_feature (1399)..(1399): n is a, c, g, or t
  misc_feature (1403)..(1404): n is a, c, g, or t
  misc_feature (1406)..(1407): n is a, c, g, or t
  misc_feature (1409)..(1412): n is a, c, g, or t
  misc_feature (1415)..(1415): n is a, c, g, or t
  misc_feature (1417)..(1417): n is a, c, g, or t
  misc_feature (1427)..(1427): n is a, c, g, or t
  misc_feature (1431)..(1431): n is a, c, g, or t
  misc_feature (1438)..(1438): n is a, c, g, or t
  misc_feature (1440)..(1440): n is a, c, g, or t
  misc_feature (1443)..(1443): n is a, c, g, or t
  misc_feature (1446)..(1447): n is a, c, g, or t
aaaaanntagaganaattactatgagaggatcgcatcaccatcaccatcacggaatcctatttaggtgacactatagaatcgtcgacccacgcgttccgccggtgctgatgctcagcgctgccccggagcctccgccgcgcccgcctcccgccctctccccaccgggctcgggcccaggctcgggctcccgccatggctcggctcgtcccggtcctaccccagagccgtcggggagcctgggcgcggcgctcgacagcancctgngtgccgccgtggcgttcaaggcagagggccagcgctgctatcgagagaagaagttccgggaggccatcggcaagtaccaccgagcgctgctgcancngaaggcggcgcanggggcccgncctancngcctgcccgcccccgcccncgggncnaccaacagccccgggtcggcgcgccncagcataagagcancggcncctggtgnatagcacggaggnggagtgtnacgactccctcacggattgcctgntgcagncgganntgataaactangaacgngtgngcgagtactgtctcatggtactggataagcacacagggnaanttcaaggnnacctacagtgtcggnattgcnttctacnacctggnnnantactnacgcgctnctgaactacctgnatggaggcccgnaancgagtanntccacanaaacacattgtgttncaataaatccatnctgantctngctgaaanatnanatcntttgcaaacttctnatnnnnaaatacnanttaagnctggtttntcanaactcganatttaatttnnnttgaanancaatnnaaggngaacnttntctaaacanntncnaaattcncnatnttnaaacatgtaaatttcccccaaattnnatnttgntntgtttntnaanaanaantttgtaanttnntntatnnaaatanaantatnataaaattanaatgaaataanttntntanattttgaaattaaaaacaantttaaaataaantaataannnanttttnanatatanaaaaanaantttnanantaannnanttntnanttnngtaatnaanaananttattnataatntcaaatttnacancttttnatataaataataantaatnnannnaanaaattantattttcttttttttcanaaannanntnnnnggnnatatattttttttntantaantanttnanaaanattantanaattttanccnaatnntnntnntaatanntttaaaanaanatnagtaanaacnattttaatttntctaanattanntnaaaanttntnttattncttntatnaanntcnnatnaaatnaanttnaanatntnatattttnantttttaannnttatctnaataaaaantttnntnntnnnnatntntttatatctntctntttttcntntanttnnat

SEQ ID NO: 80 - DNA, 1528 bp, Homo Sapiens
  misc_feature (24)..(24): n is a, c, g, or t
  misc_feature (33)..(33): n is a, c, g, or t
  misc_feature (35)..(35): n is a, c, g, or t
  misc_feature (55)..(55): n is a, c, g, or t
  misc_feature (62)..(62): n is a, c, g, or t
  misc_feature (67)..(67): n is a, c, g, or t
  misc_feature (69)..(69): n is a, c, g, or t
  misc_feature (71)..(72): n is a, c, g, or t
  misc_feature (82)..(82): n is a, c, g, or t
  misc_feature (90)..(90): n is a, c, g, or t
  misc_feature (92)..(92): n is a, c, g, or t
  misc_feature (106)..(106): n is a, c, g, or t
  misc_feature (118)..(118): n is a, c, g, or t
  misc_feature (120)..(120): n is a, c, g, or t
  misc_feature (122)..(122): n is a, c, g, or t
  misc_feature (124)..(124): n is a, c, g, or t
  misc_feature (140)..(140): n is a, c, g, or t
  misc_feature (145)..(145): n is a, c, g, or t
  misc_feature (148)..(149): n is a, c, g, or t
  misc_feature (151)..(151): n is a, c, g, or t
  misc_feature (153)..(153): n is a, c, g, or t
  misc_feature (155)..(158): n is a, c, g, or t
  misc_feature (169)..(169): n is a, c, g, or t
  misc_feature (173)..(175): n is a, c, g, or t
  misc_feature (177)..(177): n is a, c, g, or t
  misc_feature (189)..(190): n is a, c, g, or t
  misc_feature (192)..(193): n is a, c, g, or t
  misc_feature (202)..(202): n is a, c, g, or t
  misc_feature (204)..(208): n is a, c, g, or t
  misc_feature (217)..(217): n is a, c, g, or t
  misc_feature (221)..(222): n is a, c, g, or t
  misc_feature (240)..(241): n is a, c, g, or t
  misc_feature (248)..(248): n is a, c, g, or t
  misc_feature (251)..(251): n is a, c, g, or t
  misc_feature (258)..(258): n is a, c, g, or t
  misc_feature (275)..(275): n is a, c, g, or t
  misc_feature (289)..(289): n is a, c, g, or t
  misc_feature (295)..(296): n is a, c, g, or t
  misc_feature (302)..(302): n is a, c, g, or t
  misc_feature (307)..(309): n is a, c, g, or t
  misc_feature (313)..(313): n is a, c, g, or t
  misc_feature (330)..(330): n is a, c, g, or t
  misc_feature (332)..(335): n is a, c, g, or t
  misc_feature (340)..(340): n is a, c, g, or t
  misc_feature (342)..(342): n is a, c, g, or t
  misc_feature (345)..(345): n is a, c, g, or t
  misc_feature (352)..(352): n is a, c, g, or t
  misc_feature (354)..(355): n is a, c, g, or t
  misc_feature (361)..(361): n is a, c, g, or t
  misc_feature (365)..(365): n is a, c, g, or t
  misc_feature (373)..(373): n is a, c, g, or t
  misc_feature (376)..(376): n is a, c, g, or t
  misc_feature (379)..(379): n is a, c, g, or t
  misc_feature (392)..(392): n is a, c, g, or t
  misc_feature (402)..(402): n is a, c, g, or t
  misc_feature (405)..(405): n is a, c, g, or t
  misc_feature (408)..(408): n is a, c, g, or t
  misc_feature (410)..(410): n is a, c, g, or t
  misc_feature (419)..(419): n is a, c, g, or t
  misc_feature (422)..(422): n is a, c, g, or t
  misc_feature (424)..(424): n is a, c, g, or t
  misc_feature (429)..(429): n is a, c, g, or t
  misc_feature (436)..(436): n is a, c, g, or t
  misc_feature (439)..(439): n is a, c, g, or t
  misc_feature (442)..(442): n is a, c, g, or t
  misc_feature (445)..(445): n is a, c, g, or t
  misc_feature (455)..(456): n is a, c, g, or t
  misc_feature (459)..(460): n is a, c, g, or t
  misc_feature (462)..(462): n is a, c, g, or t
  misc_feature (469)..(469): n is a, c, g, or t
  misc_feature (471)..(472): n is a, c, g, or t
  misc_feature (474)..(474): n is a, c, g, or t
  misc_feature (477)..(477): n is a, c, g, or t
  misc_feature (480)..(483): n is a, c, g, or t
  misc_feature (485)..(485): n is a, c, g, or t
  misc_feature (487)..(487): n is a, c, g, or t
  misc_feature (489)..(489): n is a, c, g, or t
  misc_feature (494)..(495): n is a, c, g, or t
  misc_feature (497)..(497): n is a, c, g, or t
  misc_feature (502)..(502): n is a, c, g, or t
  misc_feature (508)..(508): n is a, c, g, or t
  misc_feature (512)..(512): n is a, c, g, or t
  misc_feature (516)..(516): n is a, c, g, or t
  misc_feature (524)..(525): n is a, c, g, or t
  misc_feature (529)..(529): n is a, c, g, or t
  misc_feature (547)..(549): n is a, c, g, or t
  misc_feature (555)..(555): n is a, c, g, or t
  misc_feature (558)..(558): n is a, c, g, or t
  misc_feature (567)..(570): n is a, c, g, or t
  misc_feature (574)..(574): n is a, c, g, or t
  misc_feature (580)..(581): n is a, c, g, or t
  misc_feature (585)..(585): n is a, c, g, or t
  misc_feature (589)..(589): n is a, c, g, or t
  misc_feature (600)..(600): n is a, c, g, or t
  misc_feature (602)..(602): n is a, c, g, or t
  misc_feature (612)..(612): n is a, c, g, or t
  misc_feature (615)..(615): n is a, c, g, or t
  misc_feature (620)..(620): n is a, c, g, or t
  misc_feature (622)..(622): n is a, c, g, or t
  misc_feature (624)..(627): n is a, c, g, or t
  misc_feature (630)..(630): n is a, c, g, or t
  misc_feature (639)..(639): n is a, c, g, or t
  misc_feature (647)..(647): n is a, c, g, or t
  misc_feature (650)..(650): n is a, c, g, or t
  misc_feature (652)..(652): n is a, c, g, or t
  misc_feature (657)..(657): n is a, c, g, or t
  misc_feature (661)..(661): n is a, c, g, or t
  misc_feature (665)..(665): n is a, c, g, or t
  misc_feature (667)..(668): n is a, c, g, or t
  misc_feature (673)..(674): n is a, c, g, or t
  misc_feature (678)..(681): n is a, c, g, or t
  misc_feature (693)..(693): n is a, c, g, or t
  misc_feature (695)..(695): n is a, c, g, or t
  misc_feature (699)..(699): n is a, c, g, or t
  misc_feature (712)..(712): n is a, c, g, or t
  misc_feature (716)..(716): n is a, c, g, or t
  misc_feature (718)..(719): n is a, c, g, or t
  misc_feature (727)..(727): n is a, c, g, or t
  misc_feature (730)..(730): n is a, c, g, or t
  misc_feature (733)..(736): n is a, c, g, or t
  misc_feature (741)..(741): n is a, c, g, or t
  misc_feature (748)..(748): n is a, c, g, or t
  misc_feature (752)..(752): n is a, c, g, or t
  misc_feature (754)..(756): n is a, c, g, or t
  misc_feature (758)..(758): n is a, c, g, or t
  misc_feature (763)..(763): n is a, c, g, or t
  misc_feature (766)..(770): n is a, c, g, or t
  misc_feature (778)..(778): n is a, c, g, or t
  misc_feature (780)..(783): n is a, c, g, or t
  misc_feature (785)..(786): n is a, c, g, or t
  misc_feature (789)..(789): n is a, c, g, or t
  misc_feature (791)..(791): n is a, c, g, or t
  misc_feature (795)..(795): n is a, c, g, or t
  misc_feature (799)..(799): n is a, c, g, or t
  misc_feature (804)..(804): n is a, c, g, or t
  misc_feature (807)..(808): n is a, c, g, or t
  misc_feature (818)..(818): n is a, c, g, or t
  misc_feature (821)..(822): n is a, c, g, or t
  misc_feature (826)..(826): n is a, c, g, or t
  misc_feature (833)..(833): n is a, c, g, or t
  misc_feature (838)..(839): n is a, c, g, or t
  misc_feature (846)..(849): n is a, c, g, or t
  misc_feature (852)..(854): n is a, c, g, or t
  misc_feature (858)..(859): n is a, c, g, or t
  misc_feature (863)..(863): n is a, c, g, or t
  misc_feature (866)..(866): n is a, c, g, or t
  misc_feature (871)..(871): n is a, c, g, or t
  misc_feature (873)..(873): n is a, c, g, or t
  misc_feature (875)..(878): n is a, c, g, or t
  misc_feature (892)..(892): n is a, c, g, or t
  misc_feature (894)..(895): n is a, c, g, or t
  misc_feature (898)..(899): n is a, c, g, or t
  misc_feature (902)..(902): n is a, c, g, or t
  misc_feature (904)..(904): n is a, c, g, or t
  misc_feature (907)..(907): n is a, c, g, or t
  misc_feature (910)..(910): n is a, c, g, or t
  misc_feature (913)..(913): n is a, c, g, or t
  misc_feature (915)..(915): n is a, c, g, or t
  misc_feature (919)..(919): n is a, c, g, or t
  misc_feature (921)..(922): n is a, c, g, or t
  misc_feature (930)..(930): n is a, c, g, or t
  misc_feature (933)..(934): n is a, c, g, or t
  misc_feature (937)..(937): n is a, c, g, or t
  misc_feature (939)..(939): n is a, c, g, or t
  misc_feature (944)..(945): n is a, c, g, or t
  misc_feature (948)..(951): n is a, c, g, or t
  misc_feature (956)..(956): n is a, c, g, or t
  misc_feature (962)..(962): n is a, c, g, or t
  misc_feature (967)..(967): n is a, c, g, or t
  misc_feature (970)..(970): n is a, c, g, or t
  misc_feature (977)..(977): n is a, c, g, or t
  misc_feature (982)..(982): n is a, c, g, or t
  misc_feature (984)..(984): n is a, c, g, or t
  misc_feature (987)..(987): n is a, c, g, or t
  misc_feature (990)..(992): n is a, c, g, or t
  misc_feature (994)..(994): n is a, c, g, or t
  misc_feature (1000)..(1000): n is a, c, g, or t
  misc_feature (1004)..(1004): n is a, c, g, or t
  misc_feature (1006)..(1006): n is a, c, g, or t
  misc_feature (1017)..(1017): n is a, c, g, or t
  misc_feature (1019)..(1023): n is a, c, g, or t
  misc_feature (1026)..(1027): n is a, c, g, or t
  misc_feature (1031)..(1031): n is a, c, g, or t
  misc_feature (1035)..(1035): n is a, c, g, or t
  misc_feature (1038)..(1039): n is a, c, g, or t
  misc_feature (1051)..(1052): n is a, c, g, or t
  misc_feature (1056)..(1056): n is a, c, g, or t
  misc_feature (1064)..(1064): n is a, c, g, or t
  misc_feature (1066)..(1066): n is a, c, g, or t
  misc_feature (1073)..(1073): n is a, c, g, or t
  misc_feature (1080)..(1080): n is a, c, g, or t
  misc_feature (1088)..(1088): n is a, c, g, or t
  misc_feature (1093)..(1093): n is a, c, g, or t
  misc_feature (1102)..(1102): n is a, c, g, or t
  misc_feature (1112)..(1113): n is a, c, g, or t
  misc_feature (1124)..(1126): n is a, c, g, or t
  misc_feature (1130)..(1130): n is a, c, g, or t
  misc_feature (1144)..(1144): n is a, c, g, or t
  misc_feature (1148)..(1148): n is a, c, g, or t
  misc_feature (1152)..(1154): n is a, c, g, or t
  misc_feature (1159)..(1159): n is a, c, g, or t
  misc_feature (1168)..(1169): n is a, c, g, or t
  misc_feature (1176)..(1179): n is a, c, g, or t
  misc_feature (1183)..(1184): n is a, c, g, or t
  misc_feature (1194)..(1194): n is a, c, g, or t
  misc_feature (1199)..(1199): n is a, c, g, or t
  misc_feature (1201)..(1202): n is a, c, g, or t
  misc_feature (1208)..(1208): n is a, c, g, or t
  misc_feature (1210)..(1210): n is a, c, g, or t
  misc_feature (1212)..(1212): n is a, c, g, or t
  misc_feature (1219)..(1219): n is a, c, g, or t
  misc_feature (1227)..(1227): n is a, c, g, or t
  misc_feature (1231)..(1231): n is a, c, g, or t
  misc_feature (1233)..(1234): n is a, c, g, or t
  misc_feature (1240)..(1241): n is a, c, g, or t
  misc_feature (1246)..(1246): n is a, c, g, or t
  misc_feature (1251)..(1251): n is a, c, g, or t
  misc_feature (1255)..(1256): n is a, c, g, or t
  misc_feature (1261)..(1262): n is a, c, g, or t
  misc_feature (1265)..(1265): n is a, c, g, or t
  misc_feature (1270)..(1270): n is a, c, g, or t
  misc_feature (1274)..(1274): n is a, c, g, or t
  misc_feature (1276)..(1276): n is a, c, g, or t
  misc_feature (1279)..(1279): n is a, c, g, or t
  misc_feature (1285)..(1286): n is a, c, g, or t
  misc_feature (1299)..(1300): n is a, c, g, or t
  misc_feature (1307)..(1307): n is a, c, g, or t
  misc_feature (1310)..(1310): n is a, c, g, or t
  misc_feature (1323)..(1323): n is a, c, g, or t
  misc_feature (1325)..(1326): n is a, c, g, or t
  misc_feature (1328)..(1329): n is a, c, g, or t
  misc_feature (1337)..(1338): n is a, c, g, or t
  misc_feature (1340)..(1340): n is a, c, g, or t
  misc_feature (1343)..(1343): n is a, c, g, or t
  misc_feature (1352)..(1352): n is a, c, g, or t
  misc_feature (1355)..(1355): n is a, c, g, or t
  misc_feature (1361)..(1361): n is a, c, g, or t
  misc_feature (1371)..(1371): n is a, c, g, or t
  misc_feature (1376)..(1376): n is a, c, g, or t
  misc_feature (1380)..(1380): n is a, c, g, or t
  misc_feature (1386)..(1387): n is a, c, g, or t
  misc_feature (1389)..(1391): n is a, c, g, or t
  misc_feature (1394)..(1394): n is a, c, g, or t
  misc_feature (1399)..(1399): n is a, c, g, or t
  misc_feature (1401)..(1401): n is a, c, g, or t
  misc_feature (1403)..(1404): n is a, c, g, or t
  misc_feature (1408)..(1410): n is a, c, g, or t
  misc_feature (1412)..(1412): n is a, c, g, or t
  misc_feature (1419)..(1419): n is a, c, g, or t
  misc_feature (1422)..(1423): n is a, c, g, or t
  misc_feature (1428)..(1428): n is a, c, g, or t
  misc_feature (1431)..(1431): n is a, c, g, or t
  misc_feature (1434)..(1434): n is a, c, g, or t
  misc_feature (1437)..(1437): n is a, c, g, or t
  misc_feature (1439)..(1439): n is a, c, g, or t
  misc_feature (1441)..(1441): n is a, c, g, or t
  misc_feature (1444)..(1444): n is a, c, g, or t
  misc_feature (1446)..(1447): n is a, c, g, or t
  misc_feature (1449)..(1451): n is a, c, g, or t
  misc_feature (1453)..(1453): n is a, c, g, or t
  misc_feature (1455)..(1456): n is a, c, g, or t
  misc_feature (1458)..(1458): n is a, c, g, or t
  misc_feature (1466)..(1466): n is a, c, g, or t
  misc_feature (1469)..(1469): n is a, c, g, or t
  misc_feature (1472)..(1472): n is a, c, g, or t
  misc_feature (1478)..(1479): n is a, c, g, or t
  misc_feature (1482)..(1483): n is a, c, g, or t
  misc_feature (1486)..(1486): n is a, c, g, or t
  misc_feature (1489)..(1489): n is a, c, g, or t
  misc_feature (1500)..(1500): n is a, c, g, or t
  misc_feature (1506)..(1506): n is a, c, g, or t
  misc_feature (1510)..(1510): n is a, c, g, or t
  misc_feature (1514)..(1515): n is a, c, g, or t
  misc_feature (1519)..(1519): n is a, c, g, or t
  misc_feature (1526)..(1526): n is a, c, g, or t
aaaaaaaaataaattactattaanaggatcgcntncccatcaccatcacggatcntatttangtganantnnaacaatcgtngacccacncnctccggtgggggcnggtgtcccctgngngngngtgagtgtgcgtgtgngtgtnganncncngnnnngtgtttcaatngagnnntngggtcatgggcnncnncgcctgacntnnnnnattgccgtnctcnngtgtctactacaaagganntgggggnggncggtganctccgcatccctcaganctcccatggacctngctgcnntaggcncaccnnnatcnccttgtcactcggtggnannnntctcntncantcctggnannacggtnaaantttgatanaangcntccggtaaggcanctggctctgnttnatnanttacttccntgntnctgtngagtcanatntgnagnccccctctcnntgnntnaagcctntnnanaanacnnnncngnancccanngntggtntttggnttangccnaccctttnnaaanatttattgcctttttgtnnnttaatnttncttcaattnnnncctntgaatnntccnccgntgtgaagtgtncnttcttaaagntcnttttncnannnngtnttcaccctnattaaccnaancncttantttnaatncnngaacnnaaannnntctttttcttcncncgcncaggtataaaaanctcncnnccaaaaanttnccnnnngaaantttaaangaangnnnanatccnggnnnnnttttccgnannnnannttnancccnattnttttnctnnaacttttccncgnngctnaaataanatttnnatttttnnnnccnnnccanngaanttnaaaanancnnnngggaccaattatcnannaannttnanaanaanacntntttncnncaaaaaanaannaancnttttnnccnnnnaaaanccccanatacnaanttgcccnaaacngnctnttnnntnaaaaanaaantnttttttctttntnnnnnccnnatancccntgnngatcaaattttnnaaantatttttntntttacancgcaaanctcatatntgaanaatgtttcntaaccccccnntttttcccctnnngggntattattttttttncgcnaaannncccanaaattttcnntatagcnnnncttnncgaaatcaangttcncnnaaaacnancntgaaaanttctctcncctntnncccccnnaatgnatttntttnnctatnnccntcccnccgntntantgtagnngagttctacgctnntattttnttntacagaaaaatananncnncctctaanntnccnggttctttnttntcctcnctacataatncatcntaanaattanntnnngcntttcntntnnatannngnccctatnaannttttnatnatnttntnanttngnncnnncnannangaagaaanctnccncttctnnatnnctngcnacctttcattnagtganatanattnnctcnacatacngt

SEQ ID NO: 81 - DNA, 256 bp, Homo Sapiens
acaccctgagctgcaagattgcagactttggcctagcacgcctcattgaggacaacgagtacacagccagggagggggccaagtttcccattaagtggacagcgccagaagccattaactacgggacattcaccatcaagtcagatgtgtggtcttttgggatcctgctgacggaaattgtcacccacggccgcatcccttacccagggatgaccaacccggaggtgattcagaacctggagcgaggctaccgcat

SEQ ID NO: 82 - DNA, 256 bp, Homo Sapiens
  misc_feature (3)..(4): n is a, c, g, or t
ttnnctatgagaggtcgcatcaccatcaccatcacggatcctatttaggtgacactatagaatcgtcgacccacgcgtccgagaggctgacgcagaatgcagactgtgtggtggtgctggacaacacagccctgaaccggattgccacagaccgcctgcacatccagaacccatccttctcccagatcaaccagctggtgtctaccatcatgtcagccagcaccaccaccctgcgctaccctggctacatgaacaa

SEQ ID NO: 83 - DNA, 256 bp, Homo Sapiens
ggacgcgtgggcgagcggggggagctggccaacgaggtgaaggtgctgctgcagggcaaaggggactcggagcacaagcgcaagaaagtggaggcgcagctgcaggagctgcaggtcaagttcaacgagggagagcgcgtgcgcacagagctggccgacaaggtcaccaagctgcaggtggagctggacaacgtgaccgggcttctcagccagtccgacagcaagtccagcaagctcaccaaggacttctccgcgc

SEQ ID NO: 84 - DNA, 1130 bp, Homo Sapiens
  misc_feature (913)..(913): n is a, c, g, or t
  misc_feature (978)..(978): n is a, c, g, or t
  misc_feature (981)..(981): n is a, c, g, or t
  misc_feature (995)..(995): n is a, c, g, or t
  misc_feature (997)..(997): n is a, c, g, or t
  misc_feature (1013)..(1013): n is a, c, g, or t
  misc_feature (1048)..(1048): n is a, c, g, or t
  misc_feature (1053)..(1053): n is a, c, g, or t
  misc_feature (1067)..(1068): n is a, c, g, or t
  misc_feature (1088)..(1088): n is a, c, g, or t
  misc_feature (1106)..(1106): n is a, c, g, or t
  misc_feature (1108)..(1108): n is a, c, g, or t
  misc_feature (1112)..(1112): n is a, c, g, or t
  misc_feature (1115)..(1116): n is a, c, g, or t
  misc_feature (1121)..(1122): n is a, c, g, or t
  misc_feature (1130)..(1130): n is a, c, g, or t
tagagaaaattactatgagaggatcgcatcaccatcaccatcacggatcctatttaggtgacactatagaatcgtcgacccacgcgtccgcagaaatgcctgccagagaggactgtttaaaaagagtgtcctcagaacctgttctgtcagttcaagaaaaaggtgttctgctgaaaagaaagttgtctcttttagaacaggatgtgattgtaaatgaagatggaagaaataagctgaaaaaacaaggagcttatggtgatattccagaagaattaatcgatgtctcagatttcgagtgttctctctgcatgaggttgttttttgagccagtaacaaccccttgcggacattcgttctgtaagaattgtcttgagcgttgtttagatcatgcaccatattgtcctctttgcaaagaaagcttaaaagagtatctagcagataggaggtactgtgtcacacagctgttggaagaattaatagtgaagtatctgcctgatgaactgtctgagagaaaaaaaatatatgatgaagaaactgctgaactctcacacttgaccaagaatgttccaatatttgtttgcactatggcctaccccactgtgccttgccctctccatgtatttgagccaagatacagattgatgattcgaagaagtatacagactggaaccaaacagtttggcatgtgtgtcagtgatacacaaaatagttttgcagattatggttgtatgttacaaattagaaacgtgcatttcttaccggacggaaggtctgtggttgatacagttggaggaaagcggtttagggttttaaaaagaggaatgaaagatggatattgcactgccgacattgaatatctggaagatgttaaggttgagaatgaagatgagattaagaatctcagagagcttcntgattgggttactctcagcctgcagctggttccaaatttaaagacagattcgaagccaattctcngcnttcggatcatgccnanagggaggaaaccttcnggcccccctaaggacctgctggggtggggctctgngttcncctgaaacccccannccactgccgtttgccatgantcttgaaaaacggtgacnanaacnctnnctgcnntttctaan

SEQ ID NO: 85 - DNA, 256 bp, Homo Sapiens
  misc_feature (107)..(107): n is a, c, g, or t
tcgagaatataaaaaattatttgctttgtgagcggatacaatataatagattaattgtgagcggataacaatttacacagaattcattaaagaggagaaattaactntgagaggatcgcatcaccatcaccatcacggatcctatttaggtgacactatagaatcgtcgacccacgcgtccgacgtggtgtaccgggacctcaagctggagaacctcatgctggacaaggacgggcacattaagatcacagacttc

SEQ ID NO: 86 - DNA, 1200 bp, Homo Sapiens
  misc_feature (2)..(2): n is a, c, g, or t
  misc_feature (860)..(860): n is a, c, g, or t
  misc_feature (880)..(880): n is a, c, g, or t
  misc_feature (897)..(897): n is a, c, g, or t
  misc_feature (914)..(914): n is a, c, g, or t
  misc_feature (932)..(932): n is a, c, g, or t
  misc_feature (936)..(936): n is a, c, g, or t
  misc_feature (982)..(982): n is a, c, g, or t
  misc_feature (987)..(987): n is a, c, g, or t
  misc_feature (1025)..(1025): n is a, c, g, or t
  misc_feature (1040)..(1040): n is a, c, g, or t
  misc_feature (1048)..(1048): n is a, c, g, or t
  misc_feature (1055)..(1056): n is a, c, g, or t
  misc_feature (1065)..(1065): n is a, c, g, or t
  misc_feature (1070)..(1070): n is a, c, g, or t
  misc_feature (1077)..(1077): n is a, c, g, or t
  misc_feature (1080)..(1080): n is a, c, g, or t
  misc_feature (1082)..(1083): n is a, c, g, or t
  misc_feature (1085)..(1085): n is a, c, g, or t
  misc_feature (1091)..(1091): n is a, c, g, or t
  misc_feature (1095)..(1095): n is a, c, g, or t
  misc_feature (1097)..(1097): n is a, c, g, or t
  misc_feature (1099)..(1100): n is a, c, g, or t
  misc_feature (1113)..(1113): n is a, c, g, or t
  misc_feature (1117)..(1117): n is a, c, g, or t
  misc_feature (1120)..(1120): n is a, c, g, or t
  misc_feature (1130)..(1134): n is a, c, g, or t
  misc_feature (1136)..(1136): n is a, c, g, or t
  misc_feature (1139)..(1139): n is a, c, g, or t
  misc_feature (1148)..(1148): n is a, c, g, or t
  misc_feature (1151)..(1151): n is a, c, g, or t
  misc_feature (1155)..(1155): n is a, c, g, or t
  misc_feature (1158)..(1158): n is a, c, g, or t
  misc_feature (1162)..(1162): n is a, c, g, or t
  misc_feature (1164)..(1164): n is a, c, g, or t
  misc_feature (1169)..(1172): n is a, c, g, or t
  misc_feature (1175)..(1175): n is a, c, g, or t
  misc_feature (1178)..(1178): n is a, c, g, or t
  misc_feature (1181)..(1181): n is a, c, g, or t
  misc_feature (1185)..(1185): n is a, c, g, or t
  misc_feature (1187)..(1187): n is a, c, g, or t
  misc_feature (1189)..(1192): n is a, c, g, or t
  misc_feature (1195)..(1195): n is a, c, g, or t
  misc_feature (1198)..(1198): n is a, c, g, or t
  misc_feature (1200)..(1200): n is a, c, g, or t
antgagaaattactatgagaggatcgcatcaccatcaccatcacgggatcctatttaggtgacactatagaatcgtcgacccacgcgtccgcccacgcgtccgagaagttggaactgaaagtgaaagaacagaaggactattgggagacagagctgcttcaactgaaagaacaaaaccagaagatgtcctcagaaaatgagaagatgggaatcagagtggatcagcttcaggcccagctgtcaactcaagagaaagaaatggagaagcttgttcagggagatcaagataagacagagcagttagagcagctgaaaaaggaaaatgaccacctctttctcagtttaactgaacagaggaaggaccagaagaagctcgagcagacagtggagcaaatgaagcagaatgaaactactgcaatgaagaaacaacaggaattaatggatgaaaactttgacctgtcaaaaagactgagtgagaacgaaattatatgtaatgctctgcagagacagaaagagagattggaaggagaaaatgatcttttgaagagggagaacagcagattgctcagttacatgggtctggattttaattctttgccgtatcaagtacctacttcagatgaaggaggcgcaagacaaaatccaggacttgcctatggaaacccatattctggtatccaagaaagttcttcccccagcccgctctccatcaagaaatgccctatctgcaaagcagatgatatttgtgatcacaccttggagcaacagcagatgcagcccctttgtttcaattgtccaatttgtgacaagatcttcccagctacagagaagcagatctttgaagaccacgtgttctgccnctctctctgagtatccccancctcttggatgtatacngagattttatagaatanaacctatagcttctaccntganttatatgagtcaagatcctgcctaacctgaaattattagggatttnctccnccctgctgcccctaacaggggagttttgtccctgatcngaaggtccctgttangggcttcngctgccnncctgggggntgctncctttantcncnnanctctanctgnancnncccccccccggcnttcntcngaggggtccnnnnnanggnccctggganggncccnccngggntnttccnnnnggnccnganttgnancnnnnggnttntn

SEQ ID NO: 87 - DNA, 1312 bp, Homo Sapiens
  misc_feature (893)..(893): n is a, c, g, or t
  misc_feature (895)..(895): n is a, c, g, or t
  misc_feature (899)..(899): n is a, c, g, or t
  misc_feature (913)..(913): n is a, c, g, or t
  misc_feature (923)..(923): n is a, c, g, or t
  misc_feature (949)..(949): n is a, c, g, or t
  misc_feature (958)..(958): n is a, c, g, or t
  misc_feature (961)..(962): n is a, c, g, or t
  misc_feature (977)..(978): n is a, c, g, or t
  misc_feature (983)..(983): n is a, c, g, or t
  misc_feature (1004)..(1004): n is a, c, g, or t
  misc_feature (1008)..(1009): n is a, c, g, or t
  misc_feature (1013)..(1013): n is a, c, g, or t
  misc_feature (1025)..(1025): n is a, c, g, or t
  misc_feature (1038)..(1038): n is a, c, g, or t
  misc_feature (1042)..(1042): n is a, c, g, or t
  misc_feature (1048)..(1048): n is a, c, g, or t
  misc_feature (1050)..(1051): n is a, c, g, or t
  misc_feature (1058)..(1058): n is a, c, g, or t
  misc_feature (1061)..(1061): n is a, c, g, or t
  misc_feature (1067)..(1067): n is a, c, g, or t
  misc_feature (1079)..(1079): n is a, c, g, or t
  misc_feature (1082)..(1082): n is a, c, g, or t
  misc_feature (1085)..(1085): n is a, c, g, or t
  misc_feature (1087)..(1087): n is a, c, g, or t
  misc_feature (1089)..(1089): n is a, c, g, or t
  misc_feature (1102)..(1102): n is a, c, g, or t
  misc_feature (1106)..(1106): n is a, c, g, or t
  misc_feature (1108)..(1108): n is a, c, g, or t
  misc_feature (1110)..(1111): n is a, c, g, or t
  misc_feature (1116)..(1117): n is a, c, g, or t
  misc_feature (1130)..(1131): n is a, c, g, or t
  misc_feature (1134)..(1134): n is a, c, g, or t
  misc_feature (1141)..(1141): n is a, c, g, or t
  misc_feature (1145)..(1145): n is a, c, g, or t
  misc_feature (1151)..(1151): n is a, c, g, or t
  misc_feature (1153)..(1154): n is a, c, g, or t
  misc_feature (1156)..(1156): n is a, c, g, or t
  misc_feature (1158)..(1158): n is a, c, g, or t
  misc_feature (1161)..(1161): n is a, c, g, or t
  misc_feature (1164)..(1164): n is a, c, g, or t
  misc_feature (1169)..(1169): n is a, c, g, or t
  misc_feature (1173)..(1173): n is a, c, g, or t
  misc_feature (1178)..(1178): n is a, c, g, or t
  misc_feature (1182)..(1182): n is a, c, g, or t
  misc_feature (1188)..(1189): n is a, c, g, or t
  misc_feature (1191)..(1191): n is a, c, g, or t
  misc_feature (1194)..(1194): n is a, c, g, or t
  misc_feature (1197)..(1198): n is a, c, g, or t
  misc_feature (1200)..(1200): n is a, c, g, or t
  misc_feature (1204)..(1205): n is a, c, g, or t
  misc_feature (1207)..(1207): n is a, c, g, or t
  misc_feature (1213)..(1213): n is a, c, g, or t
  misc_feature (1217)..(1217): n is a, c, g, or t
  misc_feature (1221)..(1225): n is a, c, g, or t
  misc_feature (1227)..(1232): n is a, c, g, or t
  misc_feature (1238)..(1238): n is a, c, g, or t
  misc_feature (1240)..(1244): n is a, c, g, or t
  misc_feature (1248)..(1248): n is a, c, g, or t
  misc_feature (1253)..(1253): n is a, c, g, or t
  misc_feature (1256)..(1256): n is a, c, g, or t
  misc_feature (1258)..(1270): n is a, c, g, or t
  misc_feature (1273)..(1273): n is a, c, g, or t
  misc_feature (1279)..(1283): n is a, c, g, or t
  misc_feature (1289)..(1293): n is a, c, g, or t
  misc_feature (1295)..(1297): n is a, c, g, or t
  misc_feature (1300)..(1305): n is a, c, g, or t
  misc_feature (1310)..(1311): n is a, c, g, or t
aatagagaaattactatgagaggatcgcatcaccatcaccatcacggatcctatttaggtgacactatagaatcgtcgacccacgcgtccgcccccacccccaacagcttcacctcagcggtccccatcgcccctgtctggccatgtagcccaggcctttcccacaaagcttcacttgtcacctcccctgggcaggcaactctcacggcccaagagtgcggagccaccccgttcaccactactcaagagggtgcagtcggctgagaaactggcagcagcacttgccgcctctgagaagaagctagccacttctcgcaagcacagccttgacctgccccactctgaactaaagaaggaactgccgcccagggaagtgagccctctggaggtagttggagccaggagtgtgctgtctggcaagggggccctgccagggaagggggtgctgcagcctgctccctcacgggccctaggcaccctccggcaggaccgagccgaacgacgggagtcgctgcagaagcaagaagccattcgtgaggtggactcctcagaggacgacaccgaggaagggcctgagaacagccagggtgcacaggagctgagcttggcacctcacccagaagtgagccagagtgtggcccctaaaggagcaggagagagtggggaagaggatcctttcccgtccagagaccctaggagcctgggcccaatggtcccaagcctattgacagggatcacactggggcctcccagaatggaaagtcccagtggtccccacaggaggctcgggagcccacaagccattgaggaggctgccagctcctcctcagcaggccccaacctaggtcagtctggagccacagaaccccatccctcctgaaggttgctggaangnccancacctccacacccnaggcactaanagcactttctcccagcacttcgggantcaccccancannagttgctctcctccnnctccncctctgggaaactgaacatgnggtnntggnaaatcccttatngagggcccaaaangggnttcccnannaaaaggnaancatggnagggggggctanccnacntncngatttggaaaaanaaantncnnccaanntaaaaacttgttnnccngggaaangggnaaaaananncncntanggnccccnaaanggccnttcnttttannanatnccnncngggnngntttggnattnaatnnnnnannnnnnaaaaanannnnncctnaaatnccnannnnnnnnnnnnnggnaaaaannnnntttttnnnnngnnnccnnnnnnaaaanna

SEQ ID NO: 88 - DNA, 1200 bp, Homo Sapiens
  misc_feature (866)..(866): n is a, c, g, or t
  misc_feature (929)..(929): n is a, c, g, or t
  misc_feature (938)..(938): n is a, c, g, or t
  misc_feature (941)..(941): n is a, c, g, or t
  misc_feature (954)..(954): n is a, c, g, or t
  misc_feature (965)..(965): n is a, c, g, or t
  misc_feature (969)..(969): n is a, c, g, or t
  misc_feature (992)..(992): n is a, c, g, or t
  misc_feature (1016)..(1016): n is a, c, g, or t
  misc_feature (1018)..(1018): n is a, c, g, or t
  misc_feature (1021)..(1021): n is a, c, g, or t
  misc_feature (1024)..(1024): n is a, c, g, or t
  misc_feature (1057)..(1057): n is a, c, g, or t
  misc_feature (1066)..(1066): n is a, c, g, or t
  misc_feature (1078)..(1078): n is a, c, g, or t
  misc_feature (1093)..(1093): n is a, c, g, or t
  misc_feature (1107)..(1107): n is a, c, g, or t
  misc_feature (1119)..(1120): n is a, c, g, or t
  misc_feature (1135)..(1135): n is a, c, g, or t
  misc_feature (1137)..(1138): n is a, c, g, or t
  misc_feature (1182)..(1184): n is a, c, g, or t
  misc_feature (1188)..(1189): n is a, c, g, or t
  misc_feature (1193)..(1193): n is a, c, g, or t
tagagaaattactatgagaggatcgcatcaccatcaccatcacggatcctatttaggtgacactatagaatcgtcgacccacgcgtccgcggaggactgcaggggcctgagccgctgctgccgccgccgccgcgcagccccacatcaacgcaccggggtcctgtcaccgccaccgccaaaaaagtcaccgccgctagggtcgccgttgcatcggtgcagggcaagatggcatccgccacagactcgcgctatgggcagaaggagtcctcggatcagaacttcgactacatgttcaagattctcatcatcggcaacagcagcgtgggcaagacgtccttcctcttccgctatgctgacgactcgttcacgcctgccttcgtcagcaccgtgggcatcgacttcaaggtcaagaccatctatcgcaacgacaagaggatcaagctgcagatctgggacacagcagggcaagagcggtaccggaccatcaccaccgcatactaccggggcgctatgggcttcatcctcatgtatgacatcaccaacgaggaatccttcaatgcagtgcaggactggtccacccagatcaagacctactcatgggacaatgcccaggtgctgctggtaggaaacaagtgtgacatggaggatgagcgggtggtgtcatcagaacgtggccggcagctagctgaccaccttgggttcgagttctttgaggcaagcgccaaggacaacattaacgtcaagcagacctttgagcgcctggtggatgtcatctgcgagaagatgtccgagtcgttggacacggcggaccctgcggtcacaggcgccaagcagggcccacagctcagtgaccagcaggtgccacngcaccaggactgcgcctgctgagagccatcccactccctttcccctcttcctgtcttcccacnttccccaantanccgggcctgaccnggcccctacanccangggcaaaaaaccctgctcctgantaacccgtccccttatttttatgnanctnttntttatttattgaaaattcccccaggggccaggntccctggcngcccaagcctgnccctctgtaaataanccctttcccatcanctggggggttcnnggcccgtaaatcccntnncctctgaaccccccccgcttttttaaaatcccccctccaatttnnntttnnaaanggccaaa

SEQ ID NO: 89 - DNA, 256 bp, Homo Sapiens
  misc_feature (4)..(4): n is a, c, g, or t
  misc_feature (17)..(17): n is a, c, g, or t
  misc_feature (20)..(21): n is a, c, g, or t
  misc_feature (37)..(37): n is a, c, g, or t
  misc_feature (41)..(41): n is a, c, g, or t
tatnaagaggagaaatnacnntgagaggatcgatacntacntacggatcctatttaggtgacactatagaatcgtcgacccacgcgtccgaccagctgcagactttctcagaggagcatcctgtgctcctaactgaggcgcctttaaacccacgaaaaaaccgggaacgagctgccgaagttttcttcgagaccttcaatgtgcccgctcttttcatctccatgcaagctgtactcagcctttacgctacaggcag

SEQ ID NO: 90 - DNA, 256 bp, Homo Sapiens
taagagaaaatactatgagaggatcgcatcaccatcaccatcacggatcctatttaggtgacactatagaatcgtcgacccacgcgtccggtttcgtggtaagtgaaggagcaaatactatggacattggacggactgtgcttcagaactaccttcctcgtcacaggcttgatgctggtactttcggaacaatgggagttggtttgggatttgctattgcagctgccgtggtggctaaagatagaagccctgggca

SEQ ID NO: 91 - DNA, 1340 bp, Homo Sapiens
  misc_feature (654)..(654): n is a, c, g, or t
  misc_feature (839)..(839): n is a, c, g, or t
  misc_feature (850)..(850): n is a, c, g, or t
  misc_feature (860)..(860): n is a, c, g, or t
  misc_feature (905)..(905): n is a, c, g, or t
  misc_feature (927)..(927): n is a, c, g, or t
  misc_feature (930)..(930): n is a, c, g, or t
  misc_feature (932)..(932): n is a, c, g, or t
  misc_feature (942)..(942): n is a, c, g, or t
  misc_feature (944)..(944): n is a, c, g, or t
  misc_feature (950)..(951): n is a, c, g, or t
  misc_feature (972)..(972): n is a, c, g, or t
  misc_feature (975)..(975): n is a, c, g, or t
  misc_feature (977)..(978): n is a, c, g, or t
  misc_feature (981)..(981): n is a, c, g, or t
  misc_feature (987)..(987): n is a, c, g, or t
  misc_feature (998)..(998): n is a, c, g, or t
  misc_feature (1003)..(1003): n is a, c, g, or t
  misc_feature (1012)..(1012): n is a, c, g, or t
  misc_feature (1027)..(1027): n is a, c, g, or t
  misc_feature (1041)..(1041): n is a, c, g, or t
  misc_feature (1045)..(1045): n is a, c, g, or t
  misc_feature (1047)..(1049): n is a, c, g, or t
  misc_feature (1051)..(1051): n is a, c, g, or t
  misc_feature (1055)..(1055): n is a, c, g, or t
  misc_feature (1058)..(1058): n is a, c, g, or t
  misc_feature (1067)..(1068): n is a, c, g, or t
  misc_feature (1073)..(1075): n is a, c, g, or t
  misc_feature (1078)..(1078): n is a, c, g, or t
  misc_feature (1085)..(1085): n is a, c, g, or t
  misc_feature (1088)..(1088): n is a, c, g, or t
  misc_feature (1090)..(1090): n is a, c, g, or t
  misc_feature (1092)..(1093): n is a, c, g, or t
  misc_feature (1102)..(1103): n is a, c, g, or t
  misc_feature (1105)..(1107): n is a, c, g, or t
  misc_feature (1110)..(1110): n is a, c, g, or t
  misc_feature (1112)..(1112): n is a, c, g, or t
  misc_feature (1114)..(1114): n is a, c, g, or t
  misc_feature (1119)..(1119): n is a, c, g, or t
  misc_feature (1124)..(1126): n is a, c, g, or t
  misc_feature (1128)..(1128): n is a, c, g, or t
  misc_feature (1131)..(1131): n is a, c, g, or t
  misc_feature (1133)..(1133): n is a, c, g, or t
  misc_feature (1136)..(1136): n is a, c, g, or t
  misc_feature (1143)..(1143): n is a, c, g, or t
  misc_feature (1146)..(1149): n is a, c, g, or t
  misc_feature (1154)..(1154): n is a, c, g, or t
  misc_feature (1164)..(1168): n is a, c, g, or t
  misc_feature (1170)..(1171): n is a, c, g, or t
  misc_feature (1174)..(1177): n is a, c, g, or t
  misc_feature (1184)..(1184): n is a, c, g, or t
  misc_feature (1187)..(1188): n is a, c, g, or t
  misc_feature (1190)..(1193): n is a, c, g, or t
  misc_feature (1198)..(1198): n is a, c, g, or t
  misc_feature (1206)..(1207): n is a, c, g, or t
  misc_feature (1210)..(1210): n is a, c, g, or t
  misc_feature (1214)..(1215): n is a, c, g, or t
  misc_feature (1217)..(1217): n is a, c, g, or t
  misc_feature (1225)..(1226): n is a, c, g, or t
  misc_feature (1232)..(1232): n is a, c, g, or t
  misc_feature (1235)..(1235): n is a, c, g, or t
  misc_feature (1238)..(1239): n is a, c, g, or t
  misc_feature (1241)..(1241): n is a, c, g, or t
  misc_feature (1243)..(1248): n is a, c, g, or t
  misc_feature (1250)..(1252): n is a, c, g, or t
  misc_feature (1254)..(1254): n is a, c, g, or t
  misc_feature (1259)..(1259): n is a, c, g, or t
  misc_feature (1262)..(1263): n is a, c, g, or t
  misc_feature (1266)..(1303): n is a, c, g, or t
  misc_feature (1308)..(1312): n is a, c, g, or t
  misc_feature (1316)..(1320): n is a, c, g, or t
  misc_feature (1323)..(1333): n is a, c, g, or t
  misc_feature (1337)..(1340): n is a, c, g, or t
gagaaattactatgagaggatcgcatcaccatcaccatcacggatcctatttaggtgacactatagaatcgtcgacccacgcgtccgcgaagcagcagcgcaggttgtccccgtttcccctcccccttcccttctccggttgccttcccgggccccttacactccacagtcccggtcccgccatgtcccagaaacaagaagaagagaaccctgcggaggagaccggcgaggagaagcaggacacgcaggagaaagaaggtattctgcctgagagagctgaagaggcaaagctaaaggccaaatacccaagcctaggacaaaagcctggaggctccgacttcctcatgaagagactccagaaagggcaaaagtactttgactcaggagactacaacatggccaaagccaagatgaagaataagcagctgccaagtgcaggaccagacaagaacctggtgactggtgatcacatccccaccccacaggatctgccccagagaaagtcctcgctcgtcaccagcaagcttgcgggtggccaagttgaatgatgctgcccggggctctgccagatcctgagacgcttcccctccctgccccacccgggtcctgtgctggctcctgccccttcctgcttttgcagccaggggtcaggangtggctcgggtgtgggctggagaggcagaagccctttcctgttggtgtcccagcacatggagccccttgggctgagcaccaagaccttgaaccttttttgttttaccttttttccaaataacagttgggagaaatatcaatgaaattctgggggtgggggtggggttgaaagggtggggtggganatatggaggantatgaattanggcttggagttggtaaaaaacattcctgactatccttcttaaccncgtggctgatgtgggggtaggnatnangggaaggaantngaatannctaatgaaaaaggggttctanttnanntcngtaaanaaatgccttgntttcngtgggggtnggaaaactggtgtcnaaaaaaaaaaaacntccntnnncnaagnaangatgcaaanncttcnnntanttttggnaangntnnttgaaaaanncnnnttnancnttttnaaaannnanggncnttnaaaaaanttnnnnggggnaaaaaagggnnnnnannggnnnnaaaaggnccnngnnnnggggnaacccccnnaancccnngnattttttnntttttnaanaannanannnnnncnnngnaaaanccnnccnnnnnnnnnnnnnnnnnnnnnnnnnnnnnnnnnnnnnnggggnnnnncccnnnnnggnnnnnnnnnnntttnnnn

SEQ ID NO: 92 - DNA, 256 bp, Homo Sapiens
gcaggcgccctgggctttttgggcgcgaaaaagaagcagtcctgggttgtacccggcgcagctgggagcggctgcttcctccggggtcgtatctccgcccggcatggggctgctggacctttgcgaggaagtgttcggcaccgccgacctttaccgggtgctgggcgtgcgacgcgaggcctccgacggcgaggtccgacgaggctaccacaaggtgtccctgcaggtacacccggaccgggtgggtgagggcgac

SEQ ID NO: 93 - DNA, 256 bp, Homo Sapiens
  misc_feature (2)..(2): n is a, c, g, or t
tnagaggagaaattaactatgagaggatcgcatcaccatcaccatcacggatcctatttaggtgacactatagaatcgtcgacccacgcgtccgaagtgagcaagctggtgaccgacaaggctgcaggaaagattactgatgccttcagttctctggccaagaggagcaattttcgtgccatcagcaaaaagctgaatttgatcccacgtgtggacggcgagtatgatctgaaagtgccccgagacatggcttacg

SEQ ID NO: 94 - DNA, 1200 bp, Homo Sapiens
  misc_feature (5)..(5): n is a, c, g, or t
  misc_feature (918)..(918): n is a, c, g, or t
  misc_feature (930)..(930): n is a, c, g, or t
  misc_feature (971)..(971): n is a, c, g, or t
  misc_feature (1007)..(1007): n is a, c, g, or t
  misc_feature (1010)..(1020): n is a, c, g, or t
  misc_feature (1022)..(1036): n is a, c, g, or t
  misc_feature (1046)..(1046): n is a, c, g, or t
  misc_feature (1049)..(1049): n is a, c, g, or t
  misc_feature (1053)..(1053): n is a, c, g, or t
  misc_feature (1060)..(1060): n is a, c, g, or t
  misc_feature (1063)..(1064): n is a, c, g, or t
  misc_feature (1066)..(1066): n is a, c, g, or t
  misc_feature (1068)..(1068): n is a, c, g, or t
  misc_feature (1079)..(1079): n is a, c, g, or t
  misc_feature (1082)..(1083): n is a, c, g, or t
  misc_feature (1100)..(1100): n is a, c, g, or t
  misc_feature (1105)..(1106): n is a, c, g, or t
  misc_feature (1112)..(1112): n is a, c, g, or t
  misc_feature (1117)..(1118): n is a, c, g, or t
  misc_feature (1126)..(1126): n is a, c, g, or t
  misc_feature (1128)..(1128): n is a, c, g, or t
  misc_feature (1140)..(1140): n is a, c, g, or t
  misc_feature (1142)..(1142): n is a, c, g, or t
  misc_feature (1147)..(1147): n is a, c, g, or t
  misc_feature (1150)..(1150): n is a, c, g, or t
  misc_feature (1156)..(1156): n is a, c, g, or t
  misc_feature (1174)..(1174): n is a, c, g, or t
  misc_feature (1184)..(1184): n is a, c, g, or t
  misc_feature (1194)..(1194): n is a, c, g, or t
  misc_feature (1196)..(1196): n is a, c, g, or t
  misc_feature (1199)..(1199): n is a, c, g, or t
tagangaaattactatgagaggatcgcatcaccatcaccatcacggatcctatttaggtgacactatagaatcgtcgacccacgcgtccgcggacgcgtgggcgcccgcgcgtcgccgccgtcgtcgccgccccccgtcccggcccccctgggttccctcagcccagccctgtccagcccggttcccgggaggatgaagttcgtgtacaaagaagagcatccgttcgagaagcgccgctctgagggcgagaagatccgaaagaaatacccggaccgggtgccggtgatagtagaaaaggctcccaaagctcggataggagacctggacaaaaagaaatacctggtgccttctgatctcacagttggtcagttctacttcttgatccggaagcgaattcatctccgagctgaggatgccttgtttttctttgtcaacaatgtcattccacccaccagtgccacaatgggtcagctgtaccaggaacaccatgaagaagacttctttctctacattgcctacagtgacgaaagtgtctacggtctgtgaagctgctgcccctgagctggaggggggtctcattctacaaagagagaggtggcccccctttcttgacctcctcctccttcaagctcaaacaccacctcccttattcaggaccggcacttcttaatgtttgtggctttctctccagcctctcttaggaggggtaatggtggagttggcatcttgtaactctcctttctcctttcttcccctttctctgcccgcctttcccatcctgctgtagacttcttgattgtcagtctgtgtcacatccagtgattggttttggtttctgtttcccctttctgactgcccaaaggggctcaaaaccccagcaatcccttcctttcactaccttcttttttggggggtanttggaaagggantgaaaattgtggggggaaggtaggaaggcacatcaataaangaggaaacccccccaaaaaaaaaaaaaaaaaaaaanaannnnnnnnnnntnnnnnnnnnnnnnnngggggggccnctncccnaaagggnggnngnantaaactttaanttnncttaaacttggaacccntgttnnaaaaancccannaaggaccncnaaaacccctttngnatttnttnaaaaancccggttggccccggggntttttttttngggaaaaccnanctna

SEQ ID NO: 95 - DNA, 1393 bp, Homo Sapiens
  misc_feature (4)..(4): n is a, c, g, or t
  misc_feature (10)..(10): n is a, c, g, or t
  misc_feature (567)..(567): n is a, c, g, or t
  misc_feature (582)..(582): n is a, c, g, or t
  misc_feature (652)..(652): n is a, c, g, or t
  misc_feature (768)..(768): n is a, c, g, or t
  misc_feature (796)..(796): n is a, c, g, or t
  misc_feature (802)..(802): n is a, c, g, or t
  misc_feature (807)..(807): n is a, c, g, or t
  misc_feature (818)..(818): n is a, c, g, or t
  misc_feature (821)..(821): n is a, c, g, or t
  misc_feature (833)..(833): n is a, c, g, or t
  misc_feature (844)..(844): n is a, c, g, or t
  misc_feature (867)..(867): n is a, c, g, or t
  misc_feature (883)..(883): n is a, c, g, or t
  misc_feature (906)..(906): n is a, c, g, or t
  misc_feature (922)..(922): n is a, c, g, or t
  misc_feature (945)..(945): n is a, c, g, or t
  misc_feature (955)..(955): n is a, c, g, or t
  misc_feature (961)..(961): n is a, c, g, or t
  misc_feature (966)..(966): n is a, c, g, or t
  misc_feature (972)..(972): n is a, c, g, or t
  misc_feature (977)..(977): n is a, c, g, or t
  misc_feature (979)..(979): n is a, c, g, or t
  misc_feature (991)..(991): n is a, c, g, or t
  misc_feature (1000)..(1000): n is a, c, g, or t
  misc_feature (1003)..(1003): n is a, c, g, or t
  misc_feature (1005)..(1005): n is a, c, g, or t
  misc_feature (1026)..(1026): n is a, c, g, or t
  misc_feature (1049)..(1049): n is a, c, g, or t
  misc_feature (1063)..(1064): n is a, c, g, or t
  misc_feature (1068)..(1068): n is a, c, g, or t
  misc_feature (1071)..(1072): n is a, c, g, or t
  misc_feature (1074)..(1074): n is a, c, g, or t
  misc_feature (1078)..(1078): n is a, c, g, or t
  misc_feature (1084)..(1085): n is a, c, g, or t
  misc_feature (1091)..(1091): n is a, c, g, or t
  misc_feature (1093)..(1093): n is a, c, g, or t
  misc_feature (1098)..(1098): n is a, c, g, or t
  misc_feature (1103)..(1103): n is a, c, g, or t
  misc_feature (1105)..(1105): n is a, c, g, or t
  misc_feature (1107)..(1107): n is a, c, g, or t
  misc_feature (1110)..(1110): n is a, c, g, or t
  misc_feature (1112)..(1112): n is a, c, g, or t
  misc_feature (1118)..(1118): n is a, c, g, or t
  misc_feature (1120)..(1120): n is a, c, g, or t
  misc_feature (1128)..(1128): n is a, c, g, or t
  misc_feature (1133)..(1133): n is a, c, g, or t
  misc_feature (1137)..(1137): n is a, c, g, or t
  misc_feature (1139)..(1139): n is a, c, g, or t
  misc_feature (1147)..(1148): n is a, c, g, or t
  misc_feature (1150)..(1150): n is a, c, g, or t
  misc_feature (1163)..(1164): n is a, c, g, or t
  misc_feature (1166)..(1167): n is a, c, g, or t
  misc_feature (1170)..(1170): n is a, c, g, or t
  misc_feature (1174)..(1174): n is a, c, g, or t
  misc_feature (1176)..(1176): n is a, c, g, or t
  misc_feature (1178)..(1178): n is a, c, g, or t
  misc_feature (1180)..(1180): n is a, c, g, or t
  misc_feature (1189)..(1189): n is a, c, g, or t
  misc_feature (1192)..(1192): n is a, c, g, or t
  misc_feature (1195)..(1195): n is a, c, g, or t
  misc_feature (1197)..(1197): n is a, c, g, or t
  misc_feature (1204)..(1204): n is a, c, g, or t
  misc_feature (1206)..(1208): n is a, c, g, or t
  misc_feature (1213)..(1213): n is a, c, g, or t
  misc_feature (1221)..(1221): n is a, c, g, or t
  misc_feature (1223)..(1223): n is a, c, g, or t
  misc_feature (1227)..(1232): n is a, c, g, or t
  misc_feature (1245)..(1245): n is a, c, g, or t
  misc_feature (1247)..(1247): n is a, c, g, or t
  misc_feature (1249)..(1251): n is a, c, g, or t
  misc_feature (1253)..(1256): n is a, c, g, or t
  misc_feature (1258)..(1260): n is a, c, g, or t
  misc_feature (1265)..(1265): n is a, c, g, or t
  misc_feature (1267)..(1267): n is a, c, g, or t
  misc_feature (1274)..(1274): n is a, c, g, or t
  misc_feature (1290)..(1291): n is a, c, g, or t
  misc_feature (1294)..(1295): n is a, c, g, or t
  misc_feature (1299)..(1299): n is a, c, g, or t
  misc_feature (1302)..(1302): n is a, c, g, or t
  misc_feature (1309)..(1311): n is a, c, g, or t
  misc_feature (1314)..(1314): n is a, c, g, or t
  misc_feature (1316)..(1316): n is a, c, g, or t
  misc_feature (1331)..(1331): n is a, c, g, or t
  misc_feature (1334)..(1334): n is a, c, g, or t
  misc_feature (1336)..(1337): n is a, c, g, or t
  misc_feature (1342)..(1342): n is a, c, g, or t
  misc_feature (1352)..(1355): n is a, c, g, or t
  misc_feature (1357)..(1361): n is a, c, g, or t
  misc_feature (1373)..(1375): n is a, c, g, or t
  misc_feature (1380)..(1380): n is a, c, g, or t
  misc_feature (1382)..(1382): n is a, c, g, or t
  misc_feature (1384)..(1392): n is a, c, g, or t
aatnagaganaattactatgagaggatcgcatcaccatcaccatcacggatcctatttaggtgacactatagaatcgtcgacccacgcgtccgcggacgcgtgggcggacgcgtgggattttcccgcgtgcgtgtgtgagtgggtgtgtgtgttttcttacaaagggtatttcgcgatcgatcgattgattcgtagttcccccccgcgcgcctttgccctttgtgctgtaatcgagctcccgccatcccaggtgcttctccgttcctctaaacgccagcgtctggacgtgagcgcaggtcgccggtttgtgccttcggtccccgcttcgccccctgccgtcccctccttatcacggtcccgctcgcggcctcgccgccccgctgtctccgccgcccgccatggcgactgcgacccccgtgccgccgcggatgggcagccgcgctggcggccccaccacgccgctgagccccacgcgcctgtcgcggctccaggagaaggaggagctgcgcgagctcaatgaccggctggcggtgtacatcgacaaggtgcgcagcctggagacgganaacagcgcgctgcanctgcaggtgacggagcgcgaggaggtgcgcggccgtgagctcaccggcctcaaggcgctctacgagaccnagctggccgacgcgcgacgcgcgctcgacgacacggcccgcgagcgcgccaagctgcagatcgagctgggcaagtgcaaggcggaacacgaccagctgctcctcaactatgctaanaaggaaatctgatcttaatggcgcccanatcaancttcnagaatatgaancancactgaaattcnaaaagatgcanctcttgctactgcacttggtganaaaaaaagttttaaanggaaaatttggaagaatctgaangatcaaaattgcccanttggaaaacctccttaacttcanccaaaaaaanatttancaaangaaacntttantnaaaataaatttngaaaaatcnttntnaaaaccttaatgaagaacttngaatttcccaaaaaccatgtatnaaaaggaaaataannaaanccnnangaancttaanncccttngnaaaangggantncnggncntcaaantnaaaaaaanaaaanttgncnaaaccctnntnaaaaaaaaaaaannannccnaatnangntnttaaagaanaantgnanaaaattncnnncaaanttaaaaancnaaannnnnnaaaaaaaaaattnantnnnannnncnnnaaaananaaaaccnaaaaaaaaaaactttnnccnntttnatnaaaaaannnaanantttaaaaaaaaaaanaanannttttnaaaaaaaaannnncnnnnnaaaaaaaaaaannnaaaananannnnnnnnna

SEQ ID NO: 96 - DNA, 1211 bp, Homo Sapiens
  misc_feature (122)..(123): n is a, c, g, or t
  misc_feature (126)..(126): n is a, c, g, or t
  misc_feature (133)..(133): n is a, c, g, or t
  misc_feature (137)..(137): n is a, c, g, or t
  misc_feature (141)..(141): n is a, c, g, or t
  misc_feature (146)..(146): n is a, c, g, or t
  misc_feature (151)..(151): n is a, c, g, or t
  misc_feature (198)..(198): n is a, c, g, or t
  misc_feature (207)..(207): n is a, c, g, or t
  misc_feature (270)..(270): n is a, c, g, or t
  misc_feature (331)..(331): n is a, c, g, or t
  misc_feature (362)..(362): n is a, c, g, or t
  misc_feature (376)..(377): n is a, c, g, or t
  misc_feature (385)..(385): n is a, c, g, or t
  misc_feature (390)..(391): n is a, c, g, or t
  misc_feature (400)..(400): n is a, c, g, or t
  misc_feature (406)..(406): n is a, c, g, or t
  misc_feature (428)..(428): n is a, c, g, or t
  misc_feature (524)..(524): n is a, c, g, or t
  misc_feature (557)..(557): n is a, c, g, or t
  misc_feature (622)..(622): n is a, c, g, or t
  misc_feature (652)..(652): n is a, c, g, or t
  misc_feature (663)..(664): n is a, c, g, or t
  misc_feature (734)..(734): n is a, c, g, or t
  misc_feature (787)..(788): n is a, c, g, or t
  misc_feature (810)..(810): n is a, c, g, or t
  misc_feature (819)..(819): n is a, c, g, or t
  misc_feature (824)..(824): n is a, c, g, or t
  misc_feature (838)..(838): n is a, c, g, or t
  misc_feature (857)..(857): n is a, c, g, or t
  misc_feature (878)..(878): n is a, c, g, or t
  misc_feature (882)..(883): n is a, c, g, or t
  misc_feature (894)..(894): n is a, c, g, or t
  misc_feature (903)..(903): n is a, c, g, or t
  misc_feature (913)..(914): n is a, c, g, or t
  misc_feature (920)..(920): n is a, c, g, or t
  misc_feature (927)..(928): n is a, c, g, or t
  misc_feature (935)..(935): n is a, c, g, or t
  misc_feature (975)..(975): n is a, c, g, or t
  misc_feature (990)..(990): n is a, c, g, or t
  misc_feature (1004)..(1004): n is a, c, g, or t
  misc_feature (1016)..(1016): n is a, c, g, or t
  misc_feature (1035)..(1035): n is a, c, g, or t
  misc_feature (1039)..(1039): n is a, c, g, or t
  misc_feature (1048)..(1048): n is a, c, g, or t
  misc_feature (1060)..(1060): n is a, c, g, or t
  misc_feature (1063)..(1063): n is a, c, g, or t
  misc_feature (1066)..(1067): n is a, c, g, or t
  misc_feature (1083)..(1083): n is a, c, g, or t
  misc_feature (1096)..(1096): n is a, c, g, or t
  misc_feature (1107)..(1107): n is a, c, g, or t
  misc_feature (1113)..(1113): n is a, c, g, or t
  misc_feature (1117)..(1117): n is a, c, g, or t
  misc_feature (1121)..(1121): n is a, c, g, or t
  misc_feature (1130)..(1130): n is a, c, g, or t
  misc_feature (1134)..(1134): n is a, c, g, or t
  misc_feature (1141)..(1142): n is a, c, g, or t
  misc_feature (1146)..(1146): n is a, c, g, or t
  misc_feature (1156)..(1157): n is a, c, g, or t
  misc_feature (1159)..(1159): n is a, c, g, or t
  misc_feature (1166)..(1166): n is a, c, g, or t
  misc_feature (1195)..(1195): n is a, c, g, or t
gagaaattactatgagaggatcgcatcaccatcaccatcacggatcctatttaggtgacactatagaatcgtcgacccacgcgtccgcgaaaaataacctggcatcctgctatttgaaacannganagttcangcangcanaaacnctgtncaaagagattctcactcgtgcacatgaaagggagtttggttctgtanatgatgaanataaacccatctggatgcttgctgaagaaagagaagaatgctgaaggaaagcaaaaggatggnacatcttttggagagtatggcggctggtacaaagcctgcaaagttgatagtccaactgttncaaccactctaaaaaaccttggggcactttncagacgtcgaggcnnatttgaanctgcnnaaacgttanaataanctgctatgaggtctcgtaaacngggtcttgacaatgttcacaaacagagggtggcagaagtgctcaatgaccctgacaacatggagaagcgcaggagccgtgagagcctcaacgtgtnacgtggtcaagtacgagagtggccctgacggangggaggaaatgaggaaaatgaagctcgggctggttaactgacttgctcagcgtcccatggcctanccgcccgtgactctcacactgtctcctgcntgacgggtggnncctcccgcagcttcccttctctctccagtgctgcccgctgtgtctagcagcctctaggatcttgtcacanctgcacctctctgtgaactggccattcctttcggtgctgctgtcctttttggnngggttcctgatttctgtatacntgtagcttngccanatatgtacttactnatataaactggattagtanatccatttactgtgtaatacncganntttaaaaattnaaagcgatnagctgttcanntttggnaacaggnnatttaantgtcccacaaggtgtttgttgccatgggcaatgacccccnacctgttgaccctanctaaacccttaaanccaaggggttgntgcccccaggtttttccgngggnacttaaaanccctgggggtcnccnctnnggaactccggggtttnccctaaaaaaatncccctagtaanatttgntggngggnctggggggnaaanttgggcnntccncttttccctnnancctgganggcccggggattgggaattggggcctttncacctcaaaaaccaac

SEQ ID NO: 97 - DNA, 1200 bp, Homo Sapiens
  misc_feature (2)..(2): n is a, c, g, or t
  misc_feature (849)..(849): n is a, c, g, or t
  misc_feature (851)..(851): n is a, c, g, or t
  misc_feature (897)..(897): n is a, c, g, or t
  misc_feature (906)..(906): n is a, c, g, or t
  misc_feature (931)..(931): n is a, c, g, or t
  misc_feature (937)..(937): n is a, c, g, or t
  misc_feature (957)..(957): n is a, c, g, or t
  misc_feature (965)..(965): n is a, c, g, or t
  misc_feature (968)..(968): n is a, c, g, or t
  misc_feature (973)..(973): n is a, c, g, or t
  misc_feature (1008)..(1008): n is a, c, g, or t
  misc_feature (1035)..(1035): n is a, c, g, or t
  misc_feature (1037)..(1037): n is a, c, g, or t
  misc_feature (1043)..(1043): n is a, c, g, or t
  misc_feature (1045)..(1045): n is a, c, g, or t
  misc_feature (1050)..(1050): n is a, c, g, or t
  misc_feature (1061)..(1061): n is a, c, g, or t
  misc_feature (1081)..(1081): n is a, c, g, or t
  misc_feature (1083)..(1083): n is a, c, g, or t
  misc_feature (1097)..(1097): n is a, c, g, or t
  misc_feature (1107)..(1112): n is a, c, g, or t
  misc_feature (1116)..(1116): n is a, c, g, or t
  misc_feature (1118)..(1118): n is a, c, g, or t
  misc_feature (1124)..(1124): n is a, c, g, or t
  misc_feature (1134)..(1134): n is a, c, g, or t
  misc_feature (1136)..(1137): n is a, c, g, or t
  misc_feature (1139)..(1139): n is a, c, g, or t
  misc_feature (1141)..(1141): n is a, c, g, or t
  misc_feature (1143)..(1146): n is a, c, g, or t
  misc_feature (1151)..(1151): n is a, c, g, or t
  misc_feature (1157)..(1157): n is a, c, g, or t
  misc_feature (1160)..(1160): n is a, c, g, or t
  misc_feature (1164)..(1164): n is a, c, g, or t
  misc_feature (1168)..(1169): n is a, c, g, or t
  misc_feature (1174)..(1174): n is a, c, g, or t
  misc_feature (1178)..(1179): n is a, c, g, or t
  misc_feature (1181)..(1182): n is a, c, g, or t
  misc_feature (1184)..(1184): n is a, c, g, or t
  misc_feature (1186)..(1186): n is a, c, g, or t
antagagagaattactatgagaggatcgcatcaccatcaccatcacggatcctatttaggtgacactatagaatcgtcgacccacgcgtccggcggcgcgagccgggcgctgcgaacgttcgccgcgggggtggctccggggcctgagtaggcgctgccgctgcctcagccgagggggctgggccggagcgtgcggaggagtgaggccgcaggagaccttcccgacgacccctgctccggcggggaagtgagcaaggatgattgaggaaagtgggaacaagcggaagaccatggcagagaagaggcagctgttcatagaaatgcgtgctcagaattttgatgtcatacgactatcaacttacagaacagcctgcaaattacgatttgtacaaaaacgatgcaaccttcatcttgttgatatctggaacatgattgaagccttccgagacaatggccttaatacactggaccataccaccgagatcagtgtgtcccgcctcgaaactgtcatctcctccatctactatcagttgaacaagcgccttccttctactcaccaaattagtgtggaacaatctatcagcctcctcctcaactttatgattgctgcatatgacagtgagggccgaggcaagttgacggtattttcagttaaagctatgttagcaaccatgtgtggtggaaaaatgctggacaaattgagatagaaagataatgctaaatatgtttttagacacaatgatggctgaccctcctccccagtgccttgtctggctacctctcatgcacaggcttgcccatgttgagaatgtcttccatcccgtggagtgctcctactgccgatgtganantatgatgggtttccggtaccgatgccagcagtgccacaactatcanctctgccanaattgcttttggcgtggccatgccnggcggnccctcacagcaaccagcacnaaatgaangancattncctcttggaaattcccctgcaaaaaaacttaaccntgcaattaataaattcttttggggggngntacccncnaaaanaaacccccccnatcctgttttttcctgaaanancccaaaaaaacccncttgaccttnnnnnnaatnanttcccncccccccccncnnananannnnaatgnaccccnggnttancccnnttttncccnngnnangnccccccccccccaa

SEQ ID NO: 98 - DNA, 1019 bp, Homo Sapiens
  misc_feature (1)..(1): n is a, c, g, or t
  misc_feature (3)..(3): n is a, c, g, or t
  misc_feature (499)..(500): n is a, c, g, or t
  misc_feature (510)..(510): n is a, c, g, or t
  misc_feature (557)..(557): n is a, c, g, or t
  misc_feature (560)..(560): n is a, c, g, or t
  misc_feature (591)..(591): n is a, c, g, or t
  misc_feature (594)..(594): n is a, c, g, or t
  misc_feature (644)..(644): n is a, c, g, or t
  misc_feature (649)..(649): n is a, c, g, or t
  misc_feature (657)..(657): n is a, c, g, or t
  misc_feature (668)..(668): n is a, c, g, or t
  misc_feature (671)..(671): n is a, c, g, or t
  misc_feature (685)..(685): n is a, c, g, or t
  misc_feature (695)..(695): n is a, c, g, or t
  misc_feature (698)..(698): n is a, c, g, or t
  misc_feature (711)..(711): n is a, c, g, or t
  misc_feature (714)..(714): n is a, c, g, or t
  misc_feature (716)..(717): n is a, c, g, or t
  misc_feature (720)..(721): n is a, c, g, or t
  misc_feature (723)..(723): n is a, c, g, or t
  misc_feature (726)..(726): n is a, c, g, or t
  misc_feature (732)..(732): n is a, c, g, or t
  misc_feature (734)..(734): n is a, c, g, or t
  misc_feature (740)..(741): n is a, c, g, or t
  misc_feature (743)..(744): n is a, c, g, or t
  misc_feature (749)..(750): n is a, c, g, or t
  misc_feature (752)..(753): n is a, c, g, or t
  misc_feature (755)..(756): n is a, c, g, or t
  misc_feature (758)..(759): n is a, c, g, or t
  misc_feature (761)..(761): n is a, c, g, or t
  misc_feature (767)..(767): n is a, c, g, or t
  misc_feature (769)..(773): n is a, c, g, or t
  misc_feature (775)..(775): n is a, c, g, or t
  misc_feature (778)..(779): n is a, c, g, or t
  misc_feature (781)..(781): n is a, c, g, or t
  misc_feature (790)..(790): n is a, c, g, or t
  misc_feature (794)..(794): n is a, c, g, or t
  misc_feature (797)..(797): n is a, c, g, or t
  misc_feature (803)..(805): n is a, c, g, or t
  misc_feature (813)..(814): n is a, c, g, or t
  misc_feature (816)..(816): n is a, c, g, or t
  misc_feature (818)..(819): n is a, c, g, or t
  misc_feature (823)..(823): n is a, c, g, or t
  misc_feature (825)..(825): n is a, c, g, or t
  misc_feature (828)..(828): n is a, c, g, or t
  misc_feature (833)..(833): n is a, c, g, or t
  misc_feature (837)..(837): n is a, c, g, or t
  misc_feature (840)..(843): n is a, c, g, or t
  misc_feature (846)..(846): n is a, c, g, or t
  misc_feature (850)..(851): n is a, c, g, or t
  misc_feature (853)..(855): n is a, c, g, or t
  misc_feature (858)..(858): n is a, c, g, or t
  misc_feature (860)..(862): n is a, c, g, or t
  misc_feature (864)..(864): n is a, c, g, or t
  misc_feature (867)..(867): n is a, c, g, or t
  misc_feature (872)..(872): n is a, c, g, or t
  misc_feature (875)..(877): n is a, c, g, or t
  misc_feature (880)..(882): n is a, c, g, or t
  misc_feature (884)..(887): n is a, c, g, or t
  misc_feature (890)..(895): n is a, c, g, or t
  misc_feature (897)..(899): n is a, c, g, or t
  misc_feature (910)..(912): n is a, c, g, or t
  misc_feature (914)..(914): n is a, c, g, or t
  misc_feature (918)..(923): n is a, c, g, or t
  misc_feature (925)..(927): n is a, c, g, or t
  misc_feature (930)..(930): n is a, c, g, or t
  misc_feature (932)..(934): n is a, c, g, or t
  misc_feature (936)..(936): n is a, c, g, or t
  misc_feature (942)..(945): n is a, c, g, or t
  misc_feature (947)..(948): n is a, c, g, or t
  misc_feature (950)..(953): n is a, c, g, or t
  misc_feature (955)..(957): n is a, c, g, or t
  misc_feature (959)..(959): n is a, c, g, or t
  misc_feature (961)..(962): n is a, c, g, or t
  misc_feature (964)..(968): n is a, c, g, or t
  misc_feature (973)..(973): n is a, c, g, or t
  misc_feature (976)..(992): n is a, c, g, or t
  misc_feature (994)..(994): n is a, c, g, or t
  misc_feature (996)..(997): n is a, c, g, or t
  misc_feature (1000)..(1009): n is a, c, g, or t
  misc_feature (1011)..(1017): n is a, c, g, or t
  misc_feature (1019)..(1019): n is a, c, g, or t
nanttagagaaattactatgagaggatcgcatcaccatcaccatcacggatcctatttaggtgacactatagaatcgtcgacccacgcgtccgccaaggaccacgggggcggcggcggcggtggcaaagaccagcagcagcagcagcaggaggcacctttaggcccgggtcccaagttttgcaaagccggccccctccaccactacccatccccctccccggaaagcagcaacccatccgctgccgccggcggcagcagcgcgaagccatccacagacttccacaacctggccagggagctggaaaactcccggggaggcagcagctgctccccagcccagagcctcagcagcggtagcggcagcggcggcggcggcggccaccaggaggcggagctgagtcccgacggcatcgccacgggcggcggcaaaggaaagaggaaattcccggaggaggcggcggagggcggcggtggcgctggtctggtagggggccgggnncgcttcgtanagcggcccctcccggcctccaaggaggatctggtgtgcacaccgcancantaccgagcctcgggcagctacttcggcctgnaanagaacggccgcctcttcgcgccgccaagtcccgagacgggcgaggcgaancgcancgccttcntggaggtgaanaangctgcccgcgcggncagcctgcangangaggggacagccnacngnncgnnantcncctccnangaccannannctggnngnngnngnngntcctcnannnnngnggnngntccctatantgantcntattannnttaattanntnannttgnantcntgttnatanatnnnntantganntnnnaantnnntntgnatttnttnnnaannntnnnntgnnnnnngnnnttttttattgnnnanaatnnnnnntnnnttngnnnanattttnnnnanntnnnnannntnanntnnnnnaaaanatnnnnnnnnnnnnnnnnntnannttnnnnnnnnnntnnnnnnnan

SEQ ID NO: 99 - DNA, 256 bp, Homo Sapiens
ttattaaagaggagaaataacttgagaggatcgcatcaccatcaccatcacggatcctatttaggtgacactatagaatcgtcgacccacgcgtccgcggacgcgtggggggatgaggaggaagagacccacatgaagaagtcagagtcggaggtggaggaggcagcagctattattgcccagcggcctgacaacccaagggagttcttcaagcagcaggaaagagtcgcatcggcctctgcgggcagctgtgatg

SEQ ID NO: 100 - DNA, 1268 bp, Homo Sapiens
  misc_feature (744)..(744): n is a, c, g, or t
  misc_feature (888)..(888): n is a, c, g, or t
  misc_feature (985)..(985): n is a, c, g, or t
  misc_feature (1001)..(1001): n is a, c, g, or t
  misc_feature (1006)..(1006): n is a, c, g, or t
  misc_feature (1017)..(1017): n is a, c, g, or t
  misc_feature (1020)..(1020): n is a, c, g, or t
  misc_feature (1032)..(1032): n is a, c, g, or t
  misc_feature (1041)..(1041): n is a, c, g, or t
  misc_feature (1071)..(1071): n is a, c, g, or t
  misc_feature (1074)..(1074): n is a, c, g, or t
  misc_feature (1076)..(1076): n is a, c, g, or t
  misc_feature (1081)..(1081): n is a, c, g, or t
  misc_feature (1087)..(1087): n is a, c, g, or t
  misc_feature (1100)..(1100): n is a, c, g, or t
  misc_feature (1104)..(1104): n is a, c, g, or t
  misc_feature (1126)..(1126): n is a, c, g, or t
  misc_feature (1128)..(1128): n is a, c, g, or t
  misc_feature (1135)..(1135): n is a, c, g, or t
  misc_feature (1139)..(1139): n is a, c, g, or t
  misc_feature (1162)..(1162): n is a, c, g, or t
  misc_feature (1167)..(1167): n is a, c, g, or t
  misc_feature (1170)..(1170): n is a, c, g, or t
  misc_feature (1173)..(1173): n is a, c, g, or t
  misc_feature (1184)..(1184): n is a, c, g, or t
  misc_feature (1191)..(1191): n is a, c, g, or t
  misc_feature (1193)..(1193): n is a, c, g, or t
  misc_feature (1211)..(1211): n is a, c, g, or t
  misc_feature (1215)..(1215): n is a, c, g, or t
  misc_feature (1221)..(1221): n is a, c, g, or t
  misc_feature (1229)..(1229): n is a, c, g, or t
  misc_feature (1246)..(1247): n is a, c, g, or t
  misc_feature (1254)..(1254): n is a, c, g, or t
  misc_feature (1259)..(1259): n is a, c, g, or t
  misc_feature (1263)..(1263): n is a, c, g, or t
  misc_feature (1265)..(1265): n is a, c, g, or t
tagagaaattactatgagaggatcgcatcaccatcaccatcacggatcctatttaggtgacactatagaatcgtcgacccacgcgtccgcccacgcgtccgggcggcgggatggaggcggcggccgagcctggaaacctggccggcgtcaggcacatcatcctggtcctctcaggaaaggggggcgttgggaaaagcaccatctccacggagctggccctggcactgcgccatgcaggcaagaaggtgggaatcctggatgtggacctgtgtggccccagtatcccccgcatgctcggggcgcagggcagggctgtgcaccagtgcgaccgcggctgggcacccgtcttcctggaccgggagcagagcatctcgctcatgtctgtgggcttcctgctggagaagccggacgaggccgtggtgtggagaggccccaagaaaaacgcgctgataaagcagtttgtgtccgacgtggcctggggggagctggactacctggtggtggacacgcccccggggacctccgatgagcacatggccaccatagaagccctgcgtccctaccagcccctgggggccctcgtggtcaccacgccccaggcggtgtccgtgggggacgtgaggcgcgagctgaccttctgtaggaagacgggcttgcgggtgatgggaatcgtggagaatatgagcggcttcacctgcccacactgcacggagtgcaccagcgtcttctccaggggcggcgganaggagctggcccagctcgccggggtgcccttcttaagctccgtgcccctggaaccctgcgctcatgaggaccctggaggaagggccacgacttcatccaggaagttccccgggagccccgccttcgctgcactcacctccatancccaaaaaattctggacgcgacgcccgcgtgcctccccttgactaaaggccaccttgcagccgcttttccaggcccaccaaggggctctgcttccanccttttcaaaaaaaanaaaangcctggggctncgntttccggggccntgcaggggncaggcccaagccaacgttcacgggaaaaanttntnccccnaacaancccaaccccaaanaatnttttccacccaacaaccttttncnttggttnggcntgcaaaggcccggggtttttgcntgctnttnccnccttttaaaanggggggngnccttgggcttttttcccnatcnaggttncccaaccngggcccccgggaacccnnggttccnaaaantttngngaa

SEQ ID NO: 101 - DNA, 1322 bp, Homo Sapiens
  misc_feature (1)..(1): n is a, c, g, or t
  misc_feature (6)..(6): n is a, c, g, or t
  misc_feature (582)..(582): n is a, c, g, or t
  misc_feature (599)..(599): n is a, c, g, or t
  misc_feature (623)..(623): n is a, c, g, or t
  misc_feature (626)..(626): n is a, c, g, or t
  misc_feature (727)..(727): n is a, c, g, or t
  misc_feature (762)..(762): n is a, c, g, or t
  misc_feature (767)..(767): n is a, c, g, or t
  misc_feature (771)..(771): n is a, c, g, or t
  misc_feature (785)..(785): n is a, c, g, or t
  misc_feature (788)..(788): n is a, c, g, or t
  misc_feature (790)..(790): n is a, c, g, or t
  misc_feature (802)..(802): n is a, c, g, or t
  misc_feature (804)..(804): n is a, c, g, or t
  misc_feature (808)..(808): n is a, c, g, or t
  misc_feature (814)..(814): n is a, c, g, or t
  misc_feature (820)..(820): n is a, c, g, or t
  misc_feature (826)..(826): n is a, c, g, or t
  misc_feature (829)..(829): n is a, c, g, or t
  misc_feature (832)..(832): n is a, c, g, or t
  misc_feature (837)..(837): n is a, c, g, or t
  misc_feature (842)..(842): n is a, c, g, or t
  misc_feature (847)..(847): n is a, c, g, or t
  misc_feature (864)..(864): n is a, c, g, or t
  misc_feature (866)..(866): n is a, c, g, or t
  misc_feature (868)..(868): n is a, c, g, or t
  misc_feature (893)..(893): n is a, c, g, or t
  misc_feature (898)..(898): n is a, c, g, or t
  misc_feature (900)..(900): n is a, c, g, or t
  misc_feature (902)..(902): n is a, c, g, or t
  misc_feature (904)..(905): n is a, c, g, or t
  misc_feature (911)..(911): n is a, c, g, or t
  misc_feature (914)..(916): n is a, c, g, or t
  misc_feature (919)..(919): n is a, c, g, or t
  misc_feature (923)..(923): n is a, c, g, or t
  misc_feature (930)..(930): n is a, c, g, or t
  misc_feature (932)..(932): n is a, c, g, or t
  misc_feature (937)..(937): n is a, c, g, or t
  misc_feature (940)..(940): n is a, c, g, or t
  misc_feature (945)..(945): n is a, c, g, or t
  misc_feature (955)..(955): n is a, c, g, or t
  misc_feature (962)..(962): n is a, c, g, or t
  misc_feature (964)..(964): n is a, c, g, or t
  misc_feature (967)..(967): n is a, c, g, or t
  misc_feature (973)..(973): n is a, c, g, or t
  misc_feature (979)..(980): n is a, c, g, or t
  misc_feature (986)..(988): n is a, c, g, or t
  misc_feature (997)..(997): n is a, c, g, or t
  misc_feature (1002)..(1002): n is a, c, g, or t
  misc_feature (1005)..(1006): n is a, c, g, or t
  misc_feature (1013)..(1013): n is a, c, g, or t
  misc_feature (1023)..(1023): n is a, c, g, or t
  misc_feature (1026)..(1026): n is a, c, g, or t
  misc_feature (1032)..(1032): n is a, c, g, or t
  misc_feature (1050)..(1052): n is a, c, g, or t
  misc_feature (1065)..(1065): n is a, c, g, or t
  misc_feature (1070)..(1070): n is a, c, g, or t
  misc_feature (1084)..(1084): n is a, c, g, or t
  misc_feature (1086)..(1086): n is a, c, g, or t
  misc_feature (1107)..(1107): n is a, c, g, or t
  misc_feature (1110)..(1110): n is a, c, g, or t
  misc_feature (1119)..(1119): n is a, c, g, or t
  misc_feature (1123)..(1123): n is a, c, g, or t
  misc_feature (1125)..(1125): n is a, c, g, or t
  misc_feature (1133)..(1136): n is a, c, g, or t
  misc_feature (1138)..(1138): n is a, c, g, or t
  misc_feature (1145)..(1145): n is a, c, g, or t
  misc_feature (1154)..(1155): n is a, c, g, or t
  misc_feature (1164)..(1165): n is a, c, g, or t
  misc_feature (1183)..(1183): n is a, c, g, or t
  misc_feature (1189)..(1189): n is a, c, g, or t
  misc_feature (1216)..(1216): n is a, c, g, or t
  misc_feature (1222)..(1223): n is a, c, g, or t
  misc_feature (1226)..(1227): n is a, c, g, or t
  misc_feature (1235)..(1235): n is a, c, g, or t
  misc_feature (1238)..(1238): n is a, c, g, or t
  misc_feature (1245)..(1245): n is a, c, g, or t
  misc_feature (1250)..(1250): n is a, c, g, or t
  misc_feature (1252)..(1253): n is a, c, g, or t
  misc_feature (1255)..(1255): n is a, c, g, or t
  misc_feature (1262)..(1262): n is a, c, g, or t
  misc_feature (1264)..(1264): n is a, c, g, or t
  misc_feature (1269)..(1270): n is a, c, g, or t
  misc_feature (1276)..(1276): n is a, c, g, or t
  misc_feature (1278)..(1279): n is a, c, g, or t
  misc_feature (1298)..(1298): n is a, c, g, or t
  misc_feature (1300)..(1301): n is a, c, g, or t
  misc_feature (1307)..(1309): n is a, c, g, or t
  misc_feature (1311)..(1311): n is a, c, g, or t
  misc_feature (1317)..(1317): n is a, c, g, or t
  misc_feature (1320)..(1320): n is a, c, g, or t
  misc_feature (1322)..(1322): n is a, c, g, or t
naattngagaaattactatgagaggatcgcatcaccatcaccatcacggatcctatttaggtgacactatagaatcgtcgacccacgcgtccgggtgctggccctgcccacgcctagggctccggcgcgtcacgggcctcagctgggattcccgcgcccctcggacggccacgagactcggacatctttccaggaacagcgtgaggaggacagaagcacccaacaggactgctcaagccacctgcgaacactgctgctaccatgcccaagagaaaggcaaaaggagatgctaaaggtgataaagcaaaggtgaaggatgagccacagaggagatcagctcggttgtctgctaaaccagctcctccaaaaccagagcccaggcctaaaaaggcctctgcaaagaagggagagaagcttcccaaagggagaaaggggaaagcagatgctggaaaggatggaaacaaccctgcaaaaaaccgagatgcctctacactccagtcccagaaagcggaaggcactggggatgccaagtgaaatgtacattttttgagagctctgtacttatagtgactctactgtttngaaatactatttttttnaattcaagttttataaaagtgtanaantttggcttttttaagttatgttgttagcacacaggacacttccttgttgtctttttgtggaagggcaagtaccactaatagggtgtatctcaaaaactganttgaaataagggaaaataggattttctgtcctggnttttngaanattgttcttgattnccntngattcccaggananattntctganatttcncgtgtncanccnctttnggacnggaancctttaagtgtgggggnancnaaaattttttgtctcctcttttccngatgncntnannataaanttnnnttncttnaaccgananttttnttngggcnttggcaaccntaaaatncnctntggttngggaannaaaacnnngggtttttnttttnaanntcccaantggggttccnttnaaaaanccaaaattcccgtttttnnntttggggaattcncccgnggggtttttttttnanccccccccgggcaaaaggggnccngaaaaaaantttnancttgcccnnnngngaaggtntcccccccnnttttaaaanntttttttttttaaaaaanaaaaanaaatttttttttattttttttggggantttttnnggnngggggttnggnaattttnaaaangnntnaaaattntnccccnntttccncnnaaaaaatttttttttaaantnntttaannngnaaaaanttntn

SEQ ID NO: 102 - DNA, 256 bp, Homo Sapiens
  misc_feature (3)..(4): n is a, c, g, or t
ttnnctatgagaggatcgcatcaccatcaccatcacggatcctatttaggtgacactatagaatcgtcgacccacgcgtccgcaaagataaaatacagacagactactcaggatgcccctgaagaggttcgtaaccgtgacttcaggagagagttggaagaaagagagagagctgctgcaagagagaaaaatagggatcgtccaacccgagaacatacaacctcctcttcagtgtcaaaaaagccacggttagacc

SEQ ID NO: 103 - DNA, 256 bp, Homo Sapiens
  misc_feature (2)..(2): n is a, c, g, or t
tnagaggagaattaactatgagaggatcgcatcaccatcaccatcacggatcctatttaggtgacactatagaatcgtcgacccacgcgtccgcggtggcggaggcgacctcgcgacctgtgtcagcagagccgccctgcaccaccatgtgcatcatcttctttaagtttgatcctcgccctgtttccaaaaacgcgtacaggctcatcttggcagccaacagggatgaattctacagccgaccctccaagttagc

SEQ ID NO: 104 - DNA, 256 bp, Homo Sapiens
taaggaggagaattaactatgagaggatcgcatcaccatcaccatcacggatcctatttaggtgacactatagaatcgtcgacccacgcgtccggttccattgaagacactagccaggctcaagagctgccaaacctcccctctcccttgcccaagatgaatctggttgagcctccctggcatatgcctcccagagaggaggaagaagaggaagaggaagaggaggagagggagaaggaagaggtagagaaacaag

SEQ ID NO: 105 - DNA, 256 bp, Homo Sapiens
  misc_feature (7)..(7): n is a, c, g, or t
  misc_feature (23)..(24): n is a, c, g, or t
  misc_feature (82)..(82): n is a, c, g, or t
  misc_feature (100)..(100): n is a, c, g, or t
  misc_feature (122)..(122): n is a, c, g, or t
  misc_feature (124)..(124): n is a, c, g, or t
  misc_feature (139)..(139): n is a, c, g, or t
  misc_feature (145)..(145): n is a, c, g, or t
  misc_feature (152)..(153): n is a, c, g, or t
  misc_feature (176)..(177): n is a, c, g, or t
  misc_feature (182)..(182): n is a, c, g, or t
  misc_feature (189)..(189): n is a, c, g, or t
  misc_feature (195)..(195): n is a, c, g, or t
  misc_feature (201)..(201): n is a, c, g, or t
  misc_feature (207)..(207): n is a, c, g, or t
  misc_feature (212)..(213): n is a, c, g, or t
  misc_feature (216)..(216): n is a, c, g, or t
  misc_feature (219)..(219): n is a, c, g, or t
  misc_feature (224)..(224): n is a, c, g, or t
  misc_feature (230)..(231): n is a, c, g, or t
  misc_feature (242)..(242): n is a, c, g, or t
  misc_feature (249)..(249): n is a, c, g, or t
  misc_feature (253)..(253): n is a, c, g, or t
agctaanaagaaaaaacccgctnntgggggtgaaaaaacccaaaccatcaccatcacggatcctagggaggggacactatanaaacgccgacccacgcgnccgcccacgcgtccgagacggncncggaggcaccacctntgctgntcagcgnngaagaagagaaggaggcacaacnnggagngaagccngagganaaaaangaaganagtgnnttnttntcatnaaaagnngggagaacggngggggcngcgncag

SEQ ID NO: 106 - DNA, 1359 bp, Homo Sapiens
  misc_feature (600)..(600): n is a, c, g, or t
  misc_feature (670)..(670): n is a, c, g, or t
  misc_feature (680)..(680): n is a, c, g, or t
  misc_feature (687)..(687): n is a, c, g, or t
  misc_feature (689)..(689): n is a, c, g, or t
  misc_feature (695)..(695): n is a, c, g, or t
  misc_feature (730)..(730): n is a, c, g, or t
  misc_feature (740)..(740): n is a, c, g, or t
  misc_feature (762)..(762): n is a, c, g, or t
  misc_feature (768)..(768): n is a, c, g, or t
  misc_feature (770)..(770): n is a, c, g, or t
  misc_feature (776)..(776): n is a, c, g, or t
  misc_feature (779)..(779): n is a, c, g, or t
  misc_feature (794)..(794): n is a, c, g, or t
  misc_feature (802)..(802): n is a, c, g, or t
  misc_feature (818)..(818): n is a, c, g, or t
  misc_feature (826)..(826): n is a, c, g, or t
  misc_feature (829)..(829): n is a, c, g, or t
  misc_feature (838)..(839): n is a, c, g, or t
  misc_feature (850)..(850): n is a, c, g, or t
  misc_feature (854)..(854): n is a, c, g, or t
  misc_feature (857)..(857): n is a, c, g, or t
  misc_feature (864)..(864): n is a, c, g, or t
  misc_feature (867)..(867): n is a, c, g, or t
  misc_feature (871)..(871): n is a, c, g, or t
  misc_feature (875)..(877): n is a, c, g, or t
  misc_feature (880)..(881): n is a, c, g, or t
  misc_feature (884)..(884): n is a, c, g, or t
  misc_feature (889)..(889): n is a, c, g, or t
  misc_feature (891)..(891): n is a, c, g, or t
  misc_feature (893)..(893): n is a, c, g, or t
  misc_feature (903)..(904): n is a, c, g, or t
  misc_feature (908)..(908): n is a, c, g, or t
  misc_feature (910)..(910): n is a, c, g, or t
  misc_feature (916)..(916): n is a, c, g, or t
  misc_feature (919)..(919): n is a, c, g, or t
  misc_feature (921)..(921): n is a, c, g, or t
  misc_feature (925)..(927): n is a, c, g, or t
  misc_feature (930)..(930): n is a, c, g, or t
  misc_feature (934)..(934): n is a, c, g, or t
  misc_feature (937)..(937): n is a, c, g, or t
  misc_feature (939)..(940): n is a, c, g, or t
  misc_feature (945)..(945): n is a, c, g, or t
  misc_feature (953)..(955): n is a, c, g, or t
  misc_feature (957)..(957): n is a, c, g, or t
  misc_feature (960)..(962): n is a, c, g, or t
  misc_feature (964)..(965): n is a, c, g, or t
  misc_feature (968)..(968): n is a, c, g, or t
  misc_feature (972)..(972): n is a, c, g, or t
  misc_feature (974)..(974): n is a, c, g, or t
  misc_feature (976)..(977): n is a, c, g, or t
  misc_feature (979)..(979): n is a, c, g, or t
  misc_feature (982)..(982): n is a, c, g, or t
  misc_feature (984)..(984): n is a, c, g, or t
  misc_feature (988)..(988): n is a, c, g, or t
  misc_feature (1000)..(1001): n is a, c, g, or t
  misc_feature (1003)..(1005): n is a, c, g, or t
  misc_feature (1010)..(1010): n is a, c, g, or t
  misc_feature (1015)..(1017): n is a, c, g, or t
  misc_feature (1023)..(1028): n is a, c, g, or t
  misc_feature (1030)..(1037): n is a, c, g, or t
  misc_feature (1040)..(1040): n is a, c, g, or t
  misc_feature (1042)..(1044): n is a, c, g, or t
  misc_feature (1048)..(1050): n is a, c, g, or t
  misc_feature (1052)..(1052): n is a, c, g, or t
  misc_feature (1060)..(1062): n is a, c, g, or t
  misc_feature (1066)..(1066): n is a, c, g, or t
  misc_feature (1068)..(1068): n is a, c, g, or t
  misc_feature (1071)..(1074): n is a, c, g, or t
  misc_feature (1077)..(1078): n is a, c, g, or t
  misc_feature (1081)..(1084): n is a, c, g, or t
  misc_feature (1086)..(1086): n is a, c, g, or t
  misc_feature (1097)..(1102): n is a, c, g, or t
  misc_feature (1104)..(1104): n is a, c, g, or t
  misc_feature (1107)..(1107): n is a, c, g, or t
  misc_feature (1109)..(1109): n is a, c, g, or t
  misc_feature (1111)..(1113): n is a, c, g, or t
  misc_feature (1115)..(1121): n is a, c, g, or t
  misc_feature (1125)..(1126): n is a, c, g, or t
  misc_feature (1129)..(1129): n is a, c, g, or t
  misc_feature (1133)..(1134): n is a, c, g, or t
  misc_feature (1136)..(1138): n is a, c, g, or t
  misc_feature (1140)..(1154): n is a, c, g, or t
  misc_feature (1157)..(1158): n is a, c, g, or t
  misc_feature (1160)..(1170): n is a, c, g, or t
  misc_feature (1172)..(1172): n is a, c, g, or t
  misc_feature (1174)..(1182): n is a, c, g, or t
  misc_feature (1185)..(1185): n is a, c, g, or t
  misc_feature (1187)..(1200): n is a, c, g, or t
  misc_feature (1203)..(1221): n is a, c, g, or t
  misc_feature (1223)..(1234): n is a, c, g, or t
  misc_feature (1236)..(1250): n is a, c, g, or t
  misc_feature (1252)..(1252): n is a, c, g, or t
  misc_feature (1254)..(1271): n is a, c, g, or t
  misc_feature (1273)..(1273): n is a, c, g, or t
  misc_feature (1275)..(1294): n is a, c, g, or t
  misc_feature (1296)..(1313): n is a, c, g, or t
  misc_feature (1315)..(1321): n is a, c, g, or t
  misc_feature (1324)..(1330): n is a, c, g, or t
  misc_feature (1333)..(1359): n is a, c, g, or t
tagagaaattactatgagaggatcgcatcaccatcaccatcacggatcctatttaggtgacactatagaatcgtcgacccacgcgtccggtgaatcaggcaccggagtgcaggttcgggggtggaatccttgggccgctgggcaagcggcgagacctggccagggccagcgagccgaggacagagggcgcgcggagggccgggccgcagccccggccgcttgcagaccccgccatggacccgttcctggtgctgctgcactcggtgtcgtccagcctgtcgagcagcgagctgaccgagctcaagttcctatgcctcgggcgcgtgggcaagcgcaagctggagcgcgtgcagagcggcctagacctcttctccatgctgctggagcagaacgacctggagcccgggcacaccgagctcctgcgcgagctgctcgcctccctgcggcgccacgacctgctgcggcgcgtcgacgacttcgaggcgggggcggcggccggggccgcgcctggggaagaagacctgtgtgcagcatttaacgtcatatgtgataatgtggggaaagattggagaaggctggctcgtcagctcaaagtctcanacaccaagatcgacagcatcgaggacagatacccccgcaacctgacagagcgtgtgcgggagtcactganaatctggaanaacacananaagganaacgcaacagtggcccacctggtgggggctctcangtcctgccanatgaacctggtggctgacctgntacaanangttcancangcccgtgacctccanaacaggantggggccatgtccccnaatgtcantgnaactcaaanncatctactccnaacntcntgatggnccnctgntttnnnctnntgnaacanangnatttacaaannctgnanttttgnttntntccnnnaangtanccnannatttnaaaaaccnnnanaannnannttnaatnancnnanaananttgntttttaaattanntnnntttanttatnnnttcccnnnnnnannnnnnnnttngnnncttnnnanaaaatttnnntttntnctnnnnatnnaannnnanaaaattttttnnnnnnanaantnannntnnnnnnnaaannttnaaanntnnnannnnnnnnnnnnnnnaannannnnnnnnnnnanannnnnnnnnttntnnnnnnnnnnnnnnaannnnnnnnnnnnnnnnnnnannnnnnnnnnnnannnnnnnnnnnnnnntntnnnnnnnnnnnnnnnnnnanannnnnnnnnnnnnnnnnnnntnnnnnnnnnnnnnnnnnnannnnnnnttnnnnnnnttnnnnnnnnnnnnnnnnnnnnnnnnnnn

SEQ ID NO: 107 - DNA, 1289 bp, Homo Sapiens
  misc_feature (1)..(2): n is a, c, g, or t
  misc_feature (842)..(842): n is a, c, g, or t
  misc_feature (892)..(892): n is a, c, g, or t
  misc_feature (944)..(944): n is a, c, g, or t
  misc_feature (950)..(950): n is a, c, g, or t
  misc_feature (955)..(955): n is a, c, g, or t
  misc_feature (957)..(957): n is a, c, g, or t
  misc_feature (964)..(964): n is a, c, g, or t
  misc_feature (969)..(969): n is a, c, g, or t
  misc_feature (981)..(981): n is a, c, g, or t
  misc_feature (994)..(994): n is a, c, g, or t
  misc_feature (1001)..(1001): n is a, c, g, or t
  misc_feature (1004)..(1004): n is a, c, g, or t
  misc_feature (1036)..(1037): n is a, c, g, or t
  misc_feature (1046)..(1046): n is a, c, g, or t
  misc_feature (1059)..(1059): n is a, c, g, or t
  misc_feature (1064)..(1064): n is a, c, g, or t
  misc_feature (1077)..(1077): n is a, c, g, or t
  misc_feature (1079)..(1079): n is a, c, g, or t
  misc_feature (1081)..(1081): n is a, c, g, or t
  misc_feature (1086)..(1086): n is a, c, g, or t
  misc_feature (1090)..(1090): n is a, c, g, or t
  misc_feature (1095)..(1095): n is a, c, g, or t
  misc_feature (1097)..(1098): n is a, c, g, or t
  misc_feature (1110)..(1110): n is a, c, g, or t
  misc_feature (1112)..(1112): n is a, c, g, or t
  misc_feature (1121)..(1121): n is a, c, g, or t
  misc_feature (1123)..(1123): n is a, c, g, or t
  misc_feature (1134)..(1134): n is a, c, g, or t
  misc_feature (1136)..(1136): n is a, c, g, or t
  misc_feature (1141)..(1144): n is a, c, g, or t
  misc_feature (1146)..(1146): n is a, c, g, or t
  misc_feature (1148)..(1148): n is a, c, g, or t
  misc_feature (1154)..(1154): n is a, c, g, or t
  misc_feature (1158)..(1158): n is a, c, g, or t
  misc_feature (1166)..(1166): n is a, c, g, or t
  misc_feature (1187)..(1187): n is a, c, g, or t
  misc_feature (1197)..(1198): n is a, c, g, or t
  misc_feature (1204)..(1205): n is a, c, g, or t
  misc_feature (1211)..(1211): n is a, c, g, or t
  misc_feature (1219)..(1220): n is a, c, g, or t
  misc_feature (1222)..(1222): n is a, c, g, or t
  misc_feature (1229)..(1229): n is a, c, g, or t
  misc_feature (1233)..(1233): n is a, c, g, or t
  misc_feature (1236)..(1236): n is a, c, g, or t
  misc_feature (1242)..(1242): n is a, c, g, or t
  misc_feature (1255)..(1255): n is a, c, g, or t
  misc_feature (1257)..(1258): n is a, c, g, or t
  misc_feature (1261)..(1261): n is a, c, g, or t
  misc_feature (1264)..(1264): n is a, c, g, or t
  misc_feature (1266)..(1266): n is a, c, g, or t
  misc_feature (1269)..(1269): n is a, c, g, or t
  misc_feature (1272)..(1272): n is a, c, g, or t
  misc_feature (1276)..(1276): n is a, c, g, or t
  misc_feature (1279)..(1279): n is a, c, g, or t
  misc_feature (1281)..(1281): n is a, c, g, or t
  misc_feature (1283)..(1286): n is a, c, g, or t
  misc_feature (1288)..(1288): n is a, c, g, or t
nntagagaaattactatgagaggatcgcatcaccatcaccatcacggatcctatttaggtgacactatagaatcgtcgacccacgcgtccgggcgacagtcggggttgcgagcggcccggggccggggcggccagggccgctgcaggacgagaccctgggtgtggcgtccgtgccctcgcagtggagggccgtccagggcatccgcggggagacgaaaagttgccagacggccagcattgccactgccagtgcatccgcccaggccaggaatcatgtggacgcccaggtgcagacggaggcccccgtgcctgtcagcgtgcagcccccgtcccagtacgacatacccaggctcgcagcctttcttcggagagtggaggccatggtcatccgagagctgaacaagaattggcagagccacgcgtttgatggcttcgaggtgaactggaccgagcagcagcagatggtgtcttgtctgtataccctgggctacccgccagcccaagcgcagggtctgcatgtgaccagcatctcctggaactccactggctctgtggtggcctgtgcctacggccggctggaccatggggactggagcacgcttaagtccttcgtgtgtgcctggaacctggaccggcgagacctgcgtccccagcaaccgtcggccgtggtggaggtccccagcgctgtcctgtgtctggccttccaccccacgcagccctcccacgtcgcaggagggctgtacagtggtgaggtgttggtgtgggacctgagccgtcttgaggacccgctgctgtggcgcacaggcctgacggatgacacccacacagaccctgtgtcccangtggtgtggctgcccgagcctgggcacagccaccgcttccaggtgctgantgtggccactgacgggaaggtgctactctggcagggcatcggggtaggccanctgcanctcananagggctnccccntggtcatgcaancactgccacggancaccaanctnaaaaaacatccccccggggaaaccaagtgggnnccacggcantggcctttttcanctttnaccctaagctgtntntntgggnaagnaaggngnnttccccctcaantnttcctgggnancttggaaaggnanccctnnnngnangccaanttcnttgccctngggggcccaaaaaaatttaanttttcccccnngggggnnccattnatttgganntnttccccnttcnaanaaattntttttaaacttgnannaanggnanttnccntttnttntntnnnngnc

SEQ ID NO: 108 - DNA, 256 bp, Homo Sapiens
  misc_feature (2)..(2): n is a, c, g, or t
tnaactatgagaggatcgcatcaccatcaccatcacggatcctatttaggtgacactatagaatcgtcgacccacgcgtccggcgccatggcggaagcagaggagcaggaaactgggtcccttgaagaatctacagatgagtctgaggaagaagagagcgaagaggaacccaagctgaagtatgaaaggctttccaatggggtaactgaaatacttcagaaggatgcagctagctgcatgacagtccatgacaagt

SEQ ID NO: 109 - DNA, 1209 bp, Homo Sapiens
  misc_feature (919)..(919): n is a, c, g, or t
  misc_feature (988)..(988): n is a, c, g, or t
  misc_feature (1035)..(1035): n is a, c, g, or t
  misc_feature (1060)..(1060): n is a, c, g, or t
  misc_feature (1069)..(1069): n is a, c, g, or t
  misc_feature (1094)..(1094): n is a, c, g, or t
  misc_feature (1104)..(1104): n is a, c, g, or t
  misc_feature (1107)..(1107): n is a, c, g, or t
  misc_feature (1109)..(1109): n is a, c, g, or t
  misc_feature (1115)..(1115): n is a, c, g, or t
  misc_feature (1118)..(1119): n is a, c, g, or t
  misc_feature (1124)..(1124): n is a, c, g, or t
  misc_feature (1136)..(1136): n is a, c, g, or t
  misc_feature (1141)..(1141): n is a, c, g, or t
  misc_feature (1146)..(1146): n is a, c, g, or t
  misc_feature (1152)..(1152): n is a, c, g, or t
  misc_feature (1163)..(1163): n is a, c, g, or t
  misc_feature (1169)..(1169): n is a, c, g, or t
  misc_feature (1176)..(1176): n is a, c, g, or t
  misc_feature (1183)..(1183): n is a, c, g, or t
  misc_feature (1186)..(1186): n is a, c, g, or t
  misc_feature (1191)..(1191): n is a, c, g, or t
tagagaaattactatgagaggatcgcatcaccatcaccatcacggatcctatttaggtgacactatagaatcgtcgacccacgcgtccgatgactcccagcttgaaaaggcaaatctcatagagctggaagatgacagtcacagcggaaagcggggaatcccacatagcctgagtggcctgcaagatccaattatagctcggatgtccatttgttcagaagacaagaaaagcccttccgaatgcagcttgatagccagcagccctgaagaaaactggcctgcatgccagaaagcctacaacctgaaccgaactcccagcaccgtgactctgaacaacaatagtgctccagccaacagagccaatcaaaatttcgatgagatggagggaattagggagacttctcaagtcattttgaggcctagttccagtcccaacccaaccactattcagaatgagaatctaaaaagcatgacacataagcgaagccaacgttcaagttacacaaggctctccaaagatcctccggagctccatgcagcagcctcttctgagagcacaggctttggagaagaaagagaaagcattctttgagaaaaacaagcaaaggagaagagtgttactgtacccttatgacagaattgtcctggattttgactccatccacgcccatcacctttctacattttgctgacagataactaaccgatgatgaggccgaggtaaaagagacatctgcagtgtgacagaagggagcatgagaagcatggctcaccagccagcctctgtggtctttgtaattagaagcttcagaactcactaatactactgtacctttcattggcgcattaccccataaaactttttgagacgaggtgagatctgagtataaagataggtcagaagtattttaaagggctnatgtgccaaaaagaaaaaaagctagagaccctttttgcaaacatttggtgaccacacatttgagggaanacgtggcgttaggtgaagcaaaagcaaaccctgctcttaggggctcncctaggtgagtgccagcctgggacnctacggganaggctgaataaaccgaaatccccgntttgttggcnggntntgcttntcnnaaggntttgaaaatagnagtcntatgnaaaggntttaaattgcnacaagnggtcccngggtggnatntggangggcttctgactttagaa

SEQ ID NO: 110 - DNA, 1230 bp, Homo Sapiens
  misc_feature (855)..(855): n is a, c, g, or t
  misc_feature (867)..(867): n is a, c, g, or t
  misc_feature (904)..(904): n is a, c, g, or t
  misc_feature (919)..(919): n is a, c, g, or t
  misc_feature (928)..(928): n is a, c, g, or t
  misc_feature (968)..(968): n is a, c, g, or t
  misc_feature (974)..(974): n is a, c, g, or t
  misc_feature (981)..(982): n is a, c, g, or t
  misc_feature (997)..(997): n is a, c, g, or t
  misc_feature (1002)..(1002): n is a, c, g, or t
  misc_feature (1015)..(1016): n is a, c, g, or t
  misc_feature (1028)..(1028): n is a, c, g, or t
  misc_feature (1046)..(1046): n is a, c, g, or t
  misc_feature (1064)..(1064): n is a, c, g, or t
  misc_feature (1069)..(1070): n is a, c, g, or t
  misc_feature (1072)..(1072): n is a, c, g, or t
  misc_feature (1088)..(1088): n is a, c, g, or t
  misc_feature (1101)..(1102): n is a, c, g, or t
  misc_feature (1108)..(1108): n is a, c, g, or t
  misc_feature (1111)..(1111): n is a, c, g, or t
  misc_feature (1114)..(1116): n is a, c, g, or t
  misc_feature (1122)..(1123): n is a, c, g, or t
  misc_feature (1136)..(1136): n is a, c, g, or t
  misc_feature (1138)..(1138): n is a, c, g, or t
  misc_feature (1144)..(1146): n is a, c, g, or t
  misc_feature (1152)..(1152): n is a, c, g, or t
  misc_feature (1170)..(1170): n is a, c, g, or t
  misc_feature (1180)..(1180): n is a, c, g, or t
  misc_feature (1199)..(1200): n is a, c, g, or t
  misc_feature (1217)..(1218): n is a, c, g, or t
  misc_feature (1224)..(1224): n is a, c, g, or t
attagagaaattactatgagaggatcgcatcaccatcaccatcacggatcctatttaggtgacactatagaatcgtcgacccacgcgtccgcgctgcttggcgacacggccgtgatccaaggggacacggccctaatcacgcggccctggagccccgctcgtaggccagaggtcgatggagtccgcaaagccctgcaagacctggggctccgaattgtggaaataggagacgagaacgcgacgctggatggcactgacgttctcttcaccggccgggagtttttcgtaggcctctccaaatggaccaatcaccgaggagctgagatcgtggcggacacgttccgggacttcgccgtctccactgtgccagtctcgggtccctcccacctgcgcggtctctgcggcatggggggacctcgcactgttgtggcaggcagcagcgacgctgcccaaaaggctgtccgggcaatggcagtgctgacagatcacccatatgcctccctgaccctcccagatgacgcagctgctgactgtctctttcttcgtcctgggttgcctggtgtgcctcctttcctcctgcaccgtggaggtggggatctgcccaacagccaggaggcactgcagaagctctctgatgtcaccctggtacctgtgtcctgctcagaactggagaaggctggcgccgggctcagctccctctgcttggtgctcagcacacgcccccacagctgagggcctggccttggggtactgctggccaggggtaggatagtataggaagtagaaggggaaggagggttagatagagaatgctgaataggcagtagttgggagagagcctcaatattgggggangggagagtgtanggaaaaaggatccactgggtgaatccctccctctcanaaccaataaaaatanaattgaacnttttaaaaaaaaaaaaaaaaaaaaggggcggccgctcccntatagngagtccnnattaagcttaattanctgancttggaactcctnnttgaaaaatccngtaaagaccctccaaacncccttcgggaattttttnaaaanncncggttgcccccggggntttttttttttgnnaaaatnaanctnnnttgggnnaaattttcggaantnaaggannntaaatnggaaaaaaattcctgggnataacccccngtaaattttcccagggccnntaaaaaaatttttgggnntttccnccgttc

SEQ ID NO: 111 - DNA, 1441 bp, Homo Sapiens
  misc_feature (823)..(823): n is a, c, g, or t
  misc_feature (861)..(861): n is a, c, g, or t
  misc_feature (893)..(893): n is a, c, g, or t
  misc_feature (939)..(939): n is a, c, g, or t
  misc_feature (945)..(945): n is a, c, g, or t
  misc_feature (947)..(947): n is a, c, g, or t
  misc_feature (949)..(949): n is a, c, g, or t
  misc_feature (966)..(966): n is a, c, g, or t
  misc_feature (973)..(973): n is a, c, g, or t
  misc_feature (979)..(979): n is a, c, g, or t
  misc_feature (983)..(984): n is a, c, g, or t
  misc_feature (991)..(991): n is a, c, g, or t
  misc_feature (1002)..(1002): n is a, c, g, or t
  misc_feature (1027)..(1028): n is a, c, g, or t
  misc_feature (1031)..(1031): n is a, c, g, or t
  misc_feature (1051)..(1051): n is a, c, g, or t
  misc_feature (1057)..(1057): n is a, c, g, or t
  misc_feature (1066)..(1066): n is a, c, g, or t
  misc_feature (1072)..(1072): n is a, c, g, or t
  misc_feature (1076)..(1076): n is a, c, g, or t
  misc_feature (1087)..(1087): n is a, c, g, or t
  misc_feature (1090)..(1090): n is a, c, g, or t
  misc_feature (1094)..(1094): n is a, c, g, or t
  misc_feature (1101)..(1101): n is a, c, g, or t
  misc_feature (1106)..(1106): n is a, c, g, or t
  misc_feature (1109)..(1109): n is a, c, g, or t
  misc_feature (1123)..(1123): n is a, c, g, or t
  misc_feature (1125)..(1126): n is a, c, g, or t
  misc_feature (1128)..(1128): n is a, c, g, or t
  misc_feature (1133)..(1133): n is a, c, g, or t
  misc_feature (1138)..(1138): n is a, c, g, or t
  misc_feature (1140)..(1141): n is a, c, g, or t
  misc_feature (1147)..(1147): n is a, c, g, or t
  misc_feature (1156)..(1156): n is a, c, g, or t
  misc_feature (1158)..(1158): n is a, c, g, or t
  misc_feature (1161)..(1161): n is a, c, g, or t
  misc_feature (1184)..(1184): n is a, c, g, or t
  misc_feature (1188)..(1188): n is a, c, g, or t
  misc_feature (1194)..(1194): n is a, c, g, or t
  misc_feature (1202)..(1202): n is a, c, g, or t
  misc_feature (1204)..(1204): n is a, c, g, or t
  misc_feature (1214)..(1214): n is a, c, g, or t
  misc_feature (1225)..(1226): n is a, c, g, or t
  misc_feature (1249)..(1249): n is a, c, g, or t
  misc_feature (1256)..(1256): n is a, c, g, or t
  misc_feature (1279)..(1280): n is a, c, g, or t
  misc_feature (1282)..(1282): n is a, c, g, or t
  misc_feature (1287)..(1287): n is a, c, g, or t
  misc_feature (1292)..(1294): n is a, c, g, or t
  misc_feature (1304)..(1304): n is a, c, g, or t
  misc_feature (1315)..(1316): n is a, c, g, or t
  misc_feature (1319)..(1320): n is a, c, g, or t
  misc_feature (1328)..(1330): n is a, c, g, or t
  misc_feature (1332)..(1332): n is a, c, g, or t
  misc_feature (1340)..(1340): n is a, c, g, or t
  misc_feature (1344)..(1344): n is a, c, g, or t
  misc_feature (1346)..(1347): n is a, c, g, or t
  misc_feature (1349)..(1350): n is a, c, g, or t
  misc_feature (1367)..(1367): n is a, c, g, or t
  misc_feature (1369)..(1369): n is a, c, g, or t
  misc_feature (1371)..(1371): n is a, c, g, or t
  misc_feature (1373)..(1373): n is a, c, g, or t
  misc_feature (1379)..(1379): n is a, c, g, or t
  misc_feature (1383)..(1383): n is a, c, g, or t
  misc_feature (1388)..(1388): n is a, c, g, or t
  misc_feature (1402)..(1403): n is a, c, g, or t
  misc_feature (1413)..(1413): n is a, c, g, or t
  misc_feature (1416)..(1416): n is a, c, g, or t
  misc_feature (1431)..(1431): n is a, c, g, or t
  misc_feature (1441)..(1441): n is a, c, g, or t
tagagagattactatgagaggatcgcatcaccatcaccatcacggatcctatttaggtgacactatagaatcgtcgacccacgcgtccgcccacgcgtccgaaccgccgccaggtcgctgttggtccacgccgcccgtcgcgccgcccgcccgctcagcgtccgccgccgccatgggagtgcaggtggaaaccatctccccaggagacgggcgcaccttccccaagcgcggccagacctgcgtggtgcactacaccgggatgcttgaagatggaaagaaatttgattcctcccgggacagaaacaagccctttaagtttatgctaggcaagcaggaggtgatccgaggctgggaagaaggggttgcccagatgagtgtgggtcagagagccaaactgactatatctccagattatgcctatggtgccactgggcacccaggcatcatcccaccacatgccactctcgtcttcgatgtggagcttctaaaactggaatgacaggaatggcctcctcccttagctccctgttcttggatctgccgtggagggatctggtgcctccagacatgtgcacatgagtccatatggagcttttcctgatgttccactccactttgtatagacatctgccctgactgaatgtgttctgtcactcagctttgcttccgacacctctgtttcctcttcccctttctcctcgtatgtgtgtttacctaaactatatgccataaacctcaagttactcattttattttgttttcattttggggtgaagattcagtttcagtcttttggatataggtttccaattaagtacatggntcaaagtattaacagcacaagtggtaagttaacattanaataggaattggtgtttgggggggggggtttngcaaagaaaaattttattttaatttttttggaaggaaatttttaanctaatnananattaaaacatttcttgnctgctgngctgcnaaannccataancaaaattttanggcccttgtttgaagaactgaaatnnctntcccaagtttgaaaaaaatntttttnggtttaaantaaaancccntaccttaaaantgnaggnggggaanggggnaanaaccttttgccttnannanttccnacccnannctcccntttaaaccntncgncttttaaaaaaaaattatgtttncttncaatgngggaaacntnaaggattttntccttgggccnncagggacctttgaaacctttttngtgggcnttttttttttccccggggttttnnanaggantttcnnnatttttaaanctcaaaatttnnaanncccctttnnnantttaaaanttantnnannttttttgagggggtttnanantnaacccngaanccccnccgaaaaactttannttttaaaaanagngtgcccccccccccnctcttttttn

SEQ ID NO: 112 - DNA, 256 bp, Homo Sapiens
ttcctcgtgccaacgtgtcttgtaaggtgcggctagaaactggggacatggcagcgcctggcccagcgctctgcctcttcgacgtggatgggaccctcaccgccccgcggcagaaaattaccaaagaaatggatgacttcctacaaaaattgaggcagaagatcaaaatcggagtggtaggcggatcggactttgagaaagtgcaggagcaactgggaaatgatgtggttgaaaaatacgattatgtgtttccaga

SEQ ID NO: 113 - DNA, 1384 bp, Homo Sapiens
  misc_feature (896)..(896): n is a, c, g, or t
  misc_feature (915)..(915): n is a, c, g, or t
  misc_feature (1010)..(1010): n is a, c, g, or t
  misc_feature (1015)..(1015): n is a, c, g, or t
  misc_feature (1018)..(1019): n is a, c, g, or t
  misc_feature (1026)..(1026): n is a, c, g, or t
  misc_feature (1028)..(1028): n is a, c, g, or t
  misc_feature (1031)..(1031): n is a, c, g, or t
  misc_feature (1044)..(1045): n is a, c, g, or t
  misc_feature (1047)..(1049): n is a, c, g, or t
  misc_feature (1051)..(1051): n is a, c, g, or t
  misc_feature (1059)..(1081): n is a, c, g, or t
  misc_feature (1094)..(1094): n is a, c, g, or t
  misc_feature (1103)..(1103): n is a, c, g, or t
  misc_feature (1107)..(1107): n is a, c, g, or t
  misc_feature (1115)..(1115): n is a, c, g, or t
  misc_feature (1127)..(1128): n is a, c, g, or t
  misc_feature (1135)..(1135): n is a, c, g, or t
  misc_feature (1137)..(1138): n is a, c, g, or t
  misc_feature (1140)..(1141): n is a, c, g, or t
  misc_feature (1145)..(1145): n is a, c, g, or t
  misc_feature (1155)..(1155): n is a, c, g, or t
  misc_feature (1157)..(1157): n is a, c, g, or t
  misc_feature (1160)..(1160): n is a, c, g, or t
  misc_feature (1163)..(1163): n is a, c, g, or t
  misc_feature (1169)..(1169): n is a, c, g, or t
  misc_feature (1197)..(1198): n is a, c, g, or t
  misc_feature (1203)..(1204): n is a, c, g, or t
  misc_feature (1210)..(1210): n is a, c, g, or t
  misc_feature (1212)..(1212): n is a, c, g, or t
  misc_feature (1215)..(1215): n is a, c, g, or t
  misc_feature (1217)..(1218): n is a, c, g, or t
  misc_feature (1220)..(1220): n is a, c, g, or t
  misc_feature (1223)..(1223): n is a, c, g, or t
  misc_feature (1226)..(1226): n is a, c, g, or t
  misc_feature (1233)..(1233): n is a, c, g, or t
  misc_feature (1237)..(1237): n is a, c, g, or t
  misc_feature (1242)..(1243): n is a, c, g, or t
  misc_feature (1250)..(1250): n is a, c, g, or t
  misc_feature (1252)..(1252): n is a, c, g, or t
  misc_feature (1263)..(1263): n is a, c, g, or t
  misc_feature (1271)..(1273): n is a, c, g, or t
  misc_feature (1275)..(1276): n is a, c, g, or t
  misc_feature (1278)..(1278): n is a, c, g, or t
  misc_feature (1284)..(1285): n is a, c, g, or t
  misc_feature (1287)..(1288): n is a, c, g, or t
  misc_feature (1290)..(1290): n is a, c, g, or t
  misc_feature (1295)..(1296): n is a, c, g, or t
  misc_feature (1311)..(1313): n is a, c, g, or t
  misc_feature (1327)..(1327): n is a, c, g, or t
  misc_feature (1331)..(1332): n is a, c, g, or t
  misc_feature (1337)..(1337): n is a, c, g, or t
  misc_feature (1341)..(1343): n is a, c, g, or t
  misc_feature (1346)..(1346): n is a, c, g, or t
  misc_feature (1351)..(1351): n is a, c, g, or t
  misc_feature (1353)..(1353): n is a, c, g, or t
  misc_feature (1355)..(1355): n is a, c, g, or t
  misc_feature (1358)..(1358): n is a, c, g, or t
  misc_feature (1361)..(1362): n is a, c, g, or t
  misc_feature (1364)..(1364): n is a, c, g, or t
  misc_feature (1366)..(1366): n is a, c, g, or t
  misc_feature (1369)..(1369): n is a, c, g, or t
  misc_feature (1374)..(1375): n is a, c, g, or t
  misc_feature (1381)..(1381): n is a, c, g, or t
  misc_feature (1383)..(1384): n is a, c, g, or t
tagagagattactatgagaggatcgcatcaccatcaccatcacggatcctatttaggtgacactatagaatcgtcgacccacgcgtccgatgaaatacaagatgacagcagtgatttgcatttagtgactttggatgaagtaactgaagaggatgaagactctctggcggattttaacaaccttaaagaagagcttaattttgttactgttgatgaagttggagaggaggaagatggagataatgatttaaaagttgagttagcacaaagcaaaaatgaccatcccacagataaaaaagggaatagaaagaagagagctgtggacacaaaaaagacaaaacttgaatccttgtcccaagtgggtccagtaaatgagaatgttatggaagaagatctaaaaaccatgattgaaagacacttaacagctaaaactccaaccaagagagttagaattgggaaaactctgccatcagaaaaagctgttgtgacagaaccagcaaaaggtgaagaggccttccagatgagtgaagttgatgaggaatctggattaaaggattcagaaccagagcgaaaacgcaagaagactgaagactcttcttcaggcaaatcagtggcgtctgatgtccctgaggaattagactttcttgtacctaaggctggattcttctgtccaatttgttccctcttctactcaggtgaaaaagcaatgacaaatcactgcaagagtacacgtcataagcaaaatactgagaaattcatggccaagcaaagaaaggaaaaggagcagaatgaggctgaagaaagaagctctaggtgattgggggaaaggaaagaattcactagaaatttgtttagggtccagttgatttgtgtatttttgttatcatttaatttgnaattttccgtttcaaaacnaatattcgtgttgtacaaatttctgatgccctaaatgtaaagagactgatggggaaagtatgatgggtttgatttttatatccaatcctccggcntgganaanntctttanantgntaaataatgtccnncnnntntttaaatnnnnnnnnnnnnnnnnnnnnnnngggcgcccccccnaaggggccnatancttaattncgacctggcccnntgaaaancnnanncccncaaccccccngnttntcnaacccngtgccccgggtttttttgggaaaccccnncctgnnatttcngnccngnncnaanggnaaaaccngganccccnnaatcccngncccaaaaattnggtttccnnncnngnccaacnncnncnggatnnctttaccaaaaaaannntttcccctttcttncccnnccccntttnnnaanggggngntnccnttnntnanaanttccnnaaaatncnn

SEQ ID NO: 114 - DNA, 1414 bp, Homo Sapiens
  misc_feature (1)..(2): n is a, c, g, or t
  misc_feature (783)..(783): n is a, c, g, or t
  misc_feature (812)..(812): n is a, c, g, or t
  misc_feature (845)..(845): n is a, c, g, or t
  misc_feature (868)..(868): n is a, c, g, or t
  misc_feature (933)..(933): n is a, c, g, or t
  misc_feature (956)..(956): n is a, c, g, or t
  misc_feature (958)..(958): n is a, c, g, or t
  misc_feature (980)..(980): n is a, c, g, or t
  misc_feature (995)..(995): n is a, c, g, or t
  misc_feature (997)..(997): n is a, c, g, or t
  misc_feature (1011)..(1011): n is a, c, g, or t
  misc_feature (1019)..(1019): n is a, c, g, or t
  misc_feature (1029)..(1030): n is a, c, g, or t
  misc_feature (1034)..(1034): n is a, c, g, or t
  misc_feature (1048)..(1048): n is a, c, g, or t
  misc_feature (1053)..(1054): n is a, c, g, or t
  misc_feature (1064)..(1064): n is a, c, g, or t
  misc_feature (1069)..(1069): n is a, c, g, or t
  misc_feature (1072)..(1072): n is a, c, g, or t
  misc_feature (1079)..(1080): n is a, c, g, or t
  misc_feature (1082)..(1082): n is a, c, g, or t
  misc_feature (1084)..(1084): n is a, c, g, or t
  misc_feature (1090)..(1090): n is a, c, g, or t
  misc_feature (1095)..(1095): n is a, c, g, or t
  misc_feature (1101)..(1101): n is a, c, g, or t
  misc_feature (1104)..(1104): n is a, c, g, or t
  misc_feature (1108)..(1108): n is a, c, g, or t
  misc_feature (1111)..(1111): n is a, c, g, or t
  misc_feature (1114)..(1115): n is a, c, g, or t
  misc_feature (1127)..(1127): n is a, c, g, or t
  misc_feature (1130)..(1130): n is a, c, g, or t
  misc_feature (1132)..(1132): n is a, c, g, or t
  misc_feature (1142)..(1142): n is a, c, g, or t
  misc_feature (1147)..(1147): n is a, c, g, or t
  misc_feature (1153)..(1153): n is a, c, g, or t
  misc_feature (1177)..(1178): n is a, c, g, or t
  misc_feature (1202)..(1203): n is a, c, g, or t
  misc_feature (1213)..(1213): n is a, c, g, or t
  misc_feature (1216)..(1216): n is a, c, g, or t
  misc_feature (1218)..(1218): n is a, c, g, or t
  misc_feature (1226)..(1226): n is a, c, g, or t
  misc_feature (1229)..(1229): n is a, c, g, or t
  misc_feature (1235)..(1239): n is a, c, g, or t
  misc_feature (1245)..(1245): n is a, c, g, or t
  misc_feature (1247)..(1247): n is a, c, g, or t
  misc_feature (1252)..(1253): n is a, c, g, or t
  misc_feature (1257)..(1257): n is a, c, g, or t
  misc_feature (1269)..(1269): n is a, c, g, or t
  misc_feature (1275)..(1275): n is a, c, g, or t
  misc_feature (1281)..(1281): n is a, c, g, or t
  misc_feature (1284)..(1284): n is a, c, g, or t
  misc_feature (1293)..(1293): n is a, c, g, or t
  misc_feature (1302)..(1302): n is a, c, g, or t
  misc_feature (1308)..(1310): n is a, c, g, or t
  misc_feature (1314)..(1314): n is a, c, g, or t
  misc_feature (1318)..(1318): n is a, c, g, or t
  misc_feature (1320)..(1320): n is a, c, g, or t
  misc_feature (1324)..(1324): n is a, c, g, or t
  misc_feature (1326)..(1327): n is a, c, g, or t
  misc_feature (1333)..(1334): n is a, c, g, or t
  misc_feature (1339)..(1339): n is a, c, g, or t
  misc_feature (1342)..(1342): n is a, c, g, or t
  misc_feature (1345)..(1345): n is a, c, g, or t
  misc_feature (1347)..(1347): n is a, c, g, or t
  misc_feature (1353)..(1353): n is a, c, g, or t
  misc_feature (1355)..(1357): n is a, c, g, or t
  misc_feature (1362)..(1362): n is a, c, g, or t
  misc_feature (1373)..(1373): n is a, c, g, or t
  misc_feature (1380)..(1380): n is a, c, g, or t
  misc_feature (1383)..(1383): n is a, c, g, or t
  misc_feature (1387)..(1389): n is a, c, g, or t
  misc_feature (1393)..(1395): n is a, c, g, or t
  misc_feature (1399)..(1399): n is a, c, g, or t
  misc_feature (1401)..(1401): n is a, c, g, or t
  misc_feature (1408)..(1408): n is a, c, g, or t
nnaattagagaaattactatgagaggatcgcatcaccatcaccatcacggatcctatttaggtgacactatagaatcgtcgacccacgcgtccgatcaaaacgaggacgaacccattcgtgttagctaccatcggaatatccactataattcagtggtgaatcctaacaaggccaccattggtgtggggctgggcctgccatcattcaaaccagggtttgcagagcagtctctgatgaagaatgccataaaaacatcggaggagtcatggattgaacagcagatgctagaagacaagaaacgggccacagactgggaggccacaaatgaagccatcgaggagcaggtggctcgggaatcctacctgcagtggttgcgggatcaggagaaacaggctcgccaggtccgaggccccagccagccccggaaagccagcgccacatgcagttcggccacagcagcagcctccagtggcctggaggagtggactagccggtccccgcggcagcggagttcagcctcgtcacctgagcaccctgagctgcatgctgaattgggcatgaagcccccttccccaggcactgttttagctcttgccaaacctccttcgccctgtgcgccaggtacaagcagtcagttctcggcaggggccgaccgggcaacttccccccttgtgtccctctaccctgctttggagtgccgggccctcattcagcagatgtccccctctgcctttggtaagcctcctttgtctggggggatggaggctgctaggagctggganagactggaagaagtggcaagtcctgaaangggctttctggagcctctggccatctccccaanaaaagaagggagaggcactggangggatttttcagatccaagggaatttgccccaaaagggtctggggtctaaatggggtttcacagncctaacaaatccttctgtttttnanaaaggagtgaaaaggggccctntgggaatttctccananccccaaatgtcggnccaaggtnaaggaaaagnnaggntaaaaacccctccnatcanncctttttctntttcnccnccccccnnangntttaantgaangggatnaangatnaantcnnccttccggggtnggngntttccccacnggaanactttnacgttttaaaaaaaaaaagtgccnnaaaacccccccccaaaaaaatttnnggaacccggnttngnaacctttnccnaccccnnnnncggttncnggggnncccnccttttggtttncccctngccccnttntattttggnccccttttncccccnnntccngggnancccncnncttttnnttggnttnaantntttttncnnnaagcntgttccccccncccaaanacntttnnnaaannngggncnaaaaaanccaaaa

SEQ ID NO: 115 - DNA, 256 bp, Homo Sapiens
  misc_feature (2)..(2): n is a, c, g, or t
tnagaggagaattaactatgagaggatcgcatcaccatcaccatcacggatcctatttaggtgacactatagaatcgtcgacccacgcgtccgcccacgcgtccgcgtcgccgccatcctcggcgcgactcgcttctttcggttctacctgggagaatccaccgccatccgccaccatggtgaacttcacggtagaccagatccgcgccatcatggacaagaaggccaacatccgcaacatgtctgtcatcgccca

SEQ ID NO: 116 - DNA, 256 bp, Homo Sapiens
  misc_feature (1)..(1): n is a, c, g, or t
nactatgagaggatcgcatcaccatcaccatcacggatcctatttaggtgacactatagaatcgtcgacccacgcgtccgcccacgcgtccgggcgacagcgggtcggcgggccgcaggagggggtcatgggtaaagactactaccagacgttgggcctggcccgcggcgcgtcggacgaggagatcaagcgggcctaccgccgccaggcgctgcgctaccacccggacaagaacaaggagcccggcgccgaggag

SEQ ID NO: 117 - DNA, 1352 bp, Homo Sapiens
  misc_feature (1)..(2): n is a, c, g, or t
  misc_feature (4)..(4): n is a, c, g, or t
  misc_feature (692)..(692): n is a, c, g, or t
  misc_feature (855)..(855): n is a, c, g, or t
  misc_feature (867)..(867): n is a, c, g, or t
  misc_feature (900)..(900): n is a, c, g, or t
  misc_feature (902)..(902): n is a, c, g, or t
  misc_feature (920)..(920): n is a, c, g, or t
  misc_feature (926)..(926): n is a, c, g, or t
  misc_feature (938)..(938): n is a, c, g, or t
  misc_feature (944)..(944): n is a, c, g, or t
  misc_feature (953)..(953): n is a, c, g, or t
  misc_feature (986)..(986): n is a, c, g, or t
  misc_feature (1015)..(1015): n is a, c, g, or t
  misc_feature (1035)..(1036): n is a, c, g, or t
  misc_feature (1043)..(1043): n is a, c, g, or t
  misc_feature (1061)..(1061): n is a, c, g, or t
  misc_feature (1068)..(1068): n is a, c, g, or t
  misc_feature (1071)..(1071): n is a, c, g, or t
  misc_feature (1073)..(1073): n is a, c, g, or t
  misc_feature (1082)..(1083): n is a, c, g, or t
  misc_feature (1099)..(1099): n is a, c, g, or t
  misc_feature (1102)..(1102): n is a, c, g, or t
  misc_feature (1106)..(1106): n is a, c, g, or t
  misc_feature (1112)..(1112): n is a, c, g, or t
  misc_feature (1125)..(1125): n is a, c, g, or t
  misc_feature (1131)..(1131): n is a, c, g, or t
  misc_feature (1135)..(1136): n is a, c, g, or t
  misc_feature (1138)..(1138): n is a, c, g, or t
  misc_feature (1141)..(1141): n is a, c, g, or t
  misc_feature (1147)..(1148): n is a, c, g, or t
  misc_feature (1150)..(1151): n is a, c, g, or t
  misc_feature (1155)..(1155): n is a, c, g, or t
  misc_feature (1160)..(1160): n is a, c, g, or t
  misc_feature (1181)..(1181): n is a, c, g, or t
  misc_feature (1184)..(1184): n is a, c, g, or t
  misc_feature (1187)..(1189): n is a, c, g, or t
  misc_feature (1192)..(1192): n is a, c, g, or t
  misc_feature (1197)..(1197): n is a, c, g, or t
  misc_feature (1199)..(1199): n is a, c, g, or t
  misc_feature (1202)..(1202): n is a, c, g, or t
  misc_feature (1204)..(1204): n is a, c, g, or t
  misc_feature (1213)..(1213): n is a, c, g, or t
  misc_feature (1224)..(1224): n is a, c, g, or t
  misc_feature (1227)..(1227): n is a, c, g, or t
  misc_feature (1242)..(1242): n is a, c, g, or t
  misc_feature (1252)..(1252): n is a, c, g, or t
  misc_feature (1257)..(1257): n is a, c, g, or t
  misc_feature (1264)..(1264): n is a, c, g, or t
  misc_feature (1272)..(1272): n is a, c, g, or t
  misc_feature (1282)..(1282): n is a, c, g, or t
  misc_feature (1285)..(1285): n is a, c, g, or t
  misc_feature (1289)..(1289): n is a, c, g, or t
  misc_feature (1291)..(1292): n is a, c, g, or t
  misc_feature (1296)..(1298): n is a, c, g, or t
  misc_feature (1302)..(1302): n is a, c, g, or t
  misc_feature (1308)..(1308): n is a, c, g, or t
  misc_feature (1314)..(1314): n is a, c, g, or t
  misc_feature (1320)..(1321): n is a, c, g, or t
  misc_feature (1326)..(1326): n is a, c, g, or t
  misc_feature (1331)..(1339): n is a, c, g, or t
  misc_feature (1344)..(1344): n is a, c, g, or t
  misc_feature (1346)..(1346): n is a, c, g, or t
  misc_feature (1352)..(1352): n is a, c, g, or t
nnantagagaaattactatgagaggatcgcatcaccatcaccatcacggatcctatttaggtgacactatagaatcgtcgacccacgcgtccgcggacgcgtgggcgccgttcagtcgccaatatgcagctctttgtccgcgcccaggagctacacaccttcgaggtgaccggccaggaaacggtcgcccagatcaaggctcatgtagcctcactggagggcattgccccggaagatcaagtcgtgctcctggcaggcgcgcccctggaggatgaggccactctgggccagtgcggggtggaggccctgactaccctggaagtagcaggccgcatgcttggaggtaaagtccatggttccctggcccgtgctggaaaagtgagaggtcagactcctaaggtggccaaacaggagaagaagaagaagaagacaggtcgggctaagcggcggatgcagtacaaccggcgctttgtcaacgttgtgcccacctttggcaagaagaagggccccaatgccaactcttaagtcttttgtaattctggctttctctaataaaaaagccacttagttcagtcaaaaaaaaaaaaaaaaaaaaaaaaaaaaaaaaagggcggccgctccctatagtgagtcgtattaagcttaattagctgagcttggactcctgttgatagatccagtaatgacctcanaactccatctggatttgttcaaaacgctcggttgccgccgggcgttttttattggtgagaatccaagctagcttggcgagattttcaggagctaaggaagctaaaatggaaaaaaaaatcactggatataccaccgttgatatatcccaatggcatcgtaaanaacattttgagncatttcagtcagttgctcaatgtacctataacnanaccgttcagctggatatnacggcntttttaaaaacngtaaanaaaaataancacaagttttatccggcctttattcccattctngccccccctgaagaatgctcatccggaanttcctatggcaatgaaaaannggggaanctggggaaatgggaaaantgttccnccntngttaacccnnttttccatgaacaaantgnaaangttttnctcccctctgganggaaancccnnanaanttccgnnanntttntaaanaaaatttcccaaaaatggggnggnttnnnggnaaaancntgncntttttcccnaaaagggtttnttnaaaaaattttttttncccccccccnccccngggggantttccccntttttttttnaangggncnnaaannnaaantttttncccccntttttnnggggnaaaannnnnnnnnggggnanggggtn

SEQ ID NO: 118 - DNA, 256 bp, Homo Sapiens
caggcgtcggtgctcagcggtgttggaacttcgttgcttgcttgcctgtgcgcgcgtgcgcggacatggcctcaaacgattatacccaacaagcaacccaaagctatggggcctaccccacccagcccgggcagggctattcccagcagagcagtcagccctacggacagcagagttacagtggttatagccagtccacggacacttcaggctatggccagagcagctattcttcttatggccagagccagaacac

SEQ ID NO: 119 - DNA, 1200 bp, Homo Sapiens
  misc_feature (917)..(917): n is a, c, g, or t
  misc_feature (920)..(920): n is a, c, g, or t
  misc_feature (923)..(923): n is a, c, g, or t
  misc_feature (931)..(931): n is a, c, g, or t
  misc_feature (934)..(934): n is a, c, g, or t
  misc_feature (937)..(937): n is a, c, g, or t
  misc_feature (954)..(954): n is a, c, g, or t
  misc_feature (966)..(966): n is a, c, g, or t
  misc_feature (976)..(976): n is a, c, g, or t
  misc_feature (982)..(983): n is a, c, g, or t
  misc_feature (990)..(993): n is a, c, g, or t
  misc_feature (996)..(998): n is a, c, g, or t
  misc_feature (1000)..(1001): n is a, c, g, or t
  misc_feature (1003)..(1005): n is a, c, g, or t
  misc_feature (1022)..(1022): n is a, c, g, or t
  misc_feature (1026)..(1026): n is a, c, g, or t
  misc_feature (1029)..(1029): n is a, c, g, or t
  misc_feature (1038)..(1038): n is a, c, g, or t
  misc_feature (1040)..(1040): n is a, c, g, or t
  misc_feature (1044)..(1044): n is a, c, g, or t
  misc_feature (1052)..(1052): n is a, c, g, or t
  misc_feature (1059)..(1059): n is a, c, g, or t
  misc_feature (1065)..(1065): n is a, c, g, or t
  misc_feature (1068)..(1068): n is a, c, g, or t
  misc_feature (1077)..(1077): n is a, c, g, or t
  misc_feature (1081)..(1081): n is a, c, g, or t
  misc_feature (1091)..(1091): n is a, c, g, or t
  misc_feature (1102)..(1103): n is a, c, g, or t
  misc_feature (1109)..(1109): n is a, c, g, or t
  misc_feature (1111)..(1111): n is a, c, g, or t
  misc_feature (1119)..(1120): n is a, c, g, or t
  misc_feature (1124)..(1124): n is a, c, g, or t
  misc_feature (1126)..(1126): n is a, c, g, or t
  misc_feature (1140)..(1141): n is a, c, g, or t
  misc_feature (1148)..(1148): n is a, c, g, or t
  misc_feature (1163)..(1164): n is a, c, g, or t
  misc_feature (1167)..(1167): n is a, c, g, or t
  misc_feature (1176)..(1177): n is a, c, g, or t
  misc_feature (1186)..(1186): n is a, c, g, or t
  misc_feature (1197)..(1197): n is a, c, g, or t
attagagaaattactatgagaggatcgcatcaccatcaccatcacggatcctatttaggtgacactatagaatcgtcgacccacgcgtccgcggacgcgtgggggggtaacaagatggcgaccgagacggtggagctccataagctaaagcttgccgaactaaagcaagaatgtcttgctcgtggtttggagaccaagggaataaagcaagatcttatccacagactccaggcatatcttgaagaacatgctgaagaggaggcaaatgaagaagatgtactgggagatgaaacagaggaagaagaaacaaagcccattgagctccctgtcaaagaggaagaaccccctgaaaaaactgttgatgtggcagcagagaagaaagtggtgaaaattacatctgaaataccacagactgagagaatgcagaagagggctgaacgattcaatgtacctgtgagcttggagagtaagaaagctgctcgggcagctaggtttgggatttcttcagttccaacaaaaggtctgtcatctgataacaaacctatggttaacttggataagctgaaggaaagagctcaaagatttggtttgaatgtctcttcaatctccagaaagtctgaagatgatgagaaactgaaaaagaggaaggagcgatttgggattgtcacaagttcagctggaactggaaccacagaggatacagaggcaaagaagaggaaaagagcagagcgctttgggattgcctgatgaaaagttcctgatactttctgttctccagtgttttccatttctctccttcttcttggtcacatatatgcctaaatgcacagtcatgtgcctacgtcctgcctcgcaatgagggagcatgtaccccaggtacatccatgaactgcggcagcagtttgacttattgctgnttncancttaaggntgntgngttttgtttttgattangttgcttgttantaaaaaaaanttggannggagaannnnaannnannannnaaaaaagggcggccccncccnatnaggggcccnantaancttaattnacctgancttggnacncctgttganaaancccgtaatgnccccccaaacnncctctngnatttttcnnaaancncggttgcccccggnnttttttnttggggaaaatcccnnctncttggcgannttttccggnccttagggaancta

SEQ ID NO: 120 - DNA, 256 bp, Homo Sapiens
tagagaaattaactatgagaggatcgcatcaccatcaccatcacggatcctatttaggtgacactatagaatcgtcgacccacgcgtccgcccacgcgtccggtctttgtgtgtgtatgtgtgatctctgcctgcaggaccagcccggtggcaccctggatctgaccctgatccgtgcccgcctccaggagaagttgtcacctccctacagctccccacaggagtttgcccaggatgtgggccgcatgttcaagca

SEQ ID NO: 121 - DNA, 256 bp, Homo Sapiens
ttcattaaagaggagaaattaactatgagaggatcgcatcaccatcaccatcacggatcctatttaggtgacactatagaatcgtcgacccacgcgtccgctgaaactcagggagagctgaaggacctgacccagaaggtagagctgctggagaagtttcgggacaactgtttggcaattttggagagcaagggccttgatccagctttaggcagtgagaccctggcatcacgacaagaatccactactgatcaca

SEQ ID NO: 122 - DNA, 1378 bp, Homo Sapiens
  misc_feature (1)..(1): n is a, c, g, or t
  misc_feature (3)..(3): n is a, c, g, or t
  misc_feature (822)..(822): n is a, c, g, or t
  misc_feature (857)..(857): n is a, c, g, or t
  misc_feature (868)..(868): n is a, c, g, or t
  misc_feature (886)..(886): n is a, c, g, or t
  misc_feature (908)..(908): n is a, c, g, or t
  misc_feature (935)..(935): n is a, c, g, or t
  misc_feature (938)..(938): n is a, c, g, or t
  misc_feature (951)..(951): n is a, c, g, or t
  misc_feature (953)..(953): n is a, c, g, or t
  misc_feature (956)..(956): n is a, c, g, or t
  misc_feature (968)..(969): n is a, c, g, or t
  misc_feature (977)..(977): n is a, c, g, or t
  misc_feature (986)..(986): n is a, c, g, or t
  misc_feature (991)..(991): n is a, c, g, or t
  misc_feature (1009)..(1009): n is a, c, g, or t
  misc_feature (1018)..(1018): n is a, c, g, or t
  misc_feature (1022)..(1022): n is a, c, g, or t
  misc_feature (1024)..(1024): n is a, c, g, or t
  misc_feature (1029)..(1029): n is a, c, g, or t
  misc_feature (1032)..(1032): n is a, c, g, or t
  misc_feature (1045)..(1045): n is a, c, g, or t
  misc_feature (1056)..(1056): n is a, c, g, or t
  misc_feature (1060)..(1060): n is a, c, g, or t
  misc_feature (1068)..(1068): n is a, c, g, or t
  misc_feature (1074)..(1076): n is a, c, g, or t
  misc_feature (1084)..(1084): n is a, c, g, or t
  misc_feature (1104)..(1105): n is a, c, g, or t
  misc_feature (1112)..(1112): n is a, c, g, or t
  misc_feature (1114)..(1114): n is a, c, g, or t
  misc_feature (1117)..(1117): n is a, c, g, or t
  misc_feature (1126)..(1126): n is a, c, g, or t
  misc_feature (1130)..(1130): n is a, c, g, or t
  misc_feature (1136)..(1136): n is a, c, g, or t
  misc_feature (1146)..(1146): n is a, c, g, or t
  misc_feature (1148)..(1148): n is a, c, g, or t
  misc_feature (1152)..(1152): n is a, c, g, or t
  misc_feature (1158)..(1158): n is a, c, g, or t
  misc_feature (1164)..(1164): n is a, c, g, or t
  misc_feature (1170)..(1172): n is a, c, g, or t
  misc_feature (1174)..(1174): n is a, c, g, or t
  misc_feature (1177)..(1177): n is a, c, g, or t
  misc_feature (1183)..(1184): n is a, c, g, or t
  misc_feature (1190)..(1190): n is a, c, g, or t
  misc_feature (1194)..(1194): n is a, c, g, or t
  misc_feature (1198)..(1198): n is a, c, g, or t
  misc_feature (1201)..(1201): n is a, c, g, or t
  misc_feature (1207)..(1207): n is a, c, g, or t
  misc_feature (1209)..(1209): n is a, c, g, or t
  misc_feature (1220)..(1220): n is a, c, g, or t
  misc_feature (1228)..(1229): n is a, c, g, or t
  misc_feature (1231)..(1231): n is a, c, g, or t
  misc_feature (1235)..(1236): n is a, c, g, or t
  misc_feature (1238)..(1239): n is a, c, g, or t
  misc_feature (1243)..(1243): n is a, c, g, or t
  misc_feature (1248)..(1248): n is a, c, g, or t
  misc_feature (1277)..(1277): n is a, c, g, or t
  misc_feature (1284)..(1284): n is a, c, g, or t
  misc_feature (1286)..(1286): n is a, c, g, or t
  misc_feature (1289)..(1289): n is a, c, g, or t
  misc_feature (1292)..(1292): n is a, c, g, or t
  misc_feature (1296)..(1297): n is a, c, g, or t
  misc_feature (1301)..(1301): n is a, c, g, or t
  misc_feature (1304)..(1304): n is a, c, g, or t
  misc_feature (1306)..(1306): n is a, c, g, or t
  misc_feature (1308)..(1308): n is a, c, g, or t
  misc_feature (1311)..(1312): n is a, c, g, or t
  misc_feature (1315)..(1315): n is a, c, g, or t
  misc_feature (1336)..(1338): n is a, c, g, or t
  misc_feature (1341)..(1343): n is a, c, g, or t
  misc_feature (1346)..(1346): n is a, c, g, or t
  misc_feature (1348)..(1350): n is a, c, g, or t
  misc_feature (1354)..(1355): n is a, c, g, or t
  misc_feature (1364)..(1367): n is a, c, g, or t
  misc_feature (1369)..(1371): n is a, c, g, or t
nantagagaaattactatgagaggatcgcatcaccatcaccatcacggatcctatttaggtgacactatagaatcgtcgacccacgcgtccgcgctcctgggcgggggatgttgtgatggagaagccgcggcggagcccgaaccccgcagcctgagccacctccgtcatctgggcccggggcctcaccgcgcaggagctgccaaggccatgtctgttccatcatcactgagccagtcggccattaatgccaacagccacggaggccccgcactgagcctacccctgcctctgcacgctgcccacaaccagctgctcaacgccaagctgcaggccacagctgtgggacccaaggacctgcgcagcgccatgggggagggtggtgggcctgagccaggccctgccaatgccaagtggctaaaagagggccagaaccagctccggcgggccgccacggcccaccgtgaccagaatcgcaatgtgaccttgaccttggcggaggaggccagccaggagcctgagatggcacccttgggccccaaaggcctgatacacctgtactctgagctggagctctcagctcacaacgcagccaaccgaggcctacgaggacctggcctgatcatcagcactcaagagcaggggccagatgagggagaggagaaggcggccggggaggccgaggaggaggaggaggatgatgatgatgaagaggaggaggaggacttatcttctcccccagggctgcctgagcccctggagagtgtggaggcccctcccaggccccaagcccttacagatggcccccgggaacacagcaagantgccagcctcctgtttggcatgcggaacagtgcanccagtgatgangactcaagctgggctacnttatcccagggcagccccttcntatggctccccaaagaaaaaaaattcnttntggaaccccaacncnttnaaaacgaattcnnacctgccngctgaatgnatganggtccagaaacttcaggnacctattantggnanatccnaanagggaccacccantgggaaccccncggncgggcctncccctnnnaggggaanaacccccaaaaagaatccannttcactngnaangtttttttnatgnaaaagnttttaagaangnaaanttttgnaagaanaacccnnnanaancccccnntggaantggnaatnaanaacttnanaagggaatttnactttccnntnaaanntnncccnaaacnttttcccaaaaaaaaaaaaattttccccngaaaaananccnggnaaanntttnccngncnccnnaangggaaaaaaaaaaaaaaaaannnccnnnaanannngggnnaaaaatttnnnncnnntttttaa

SEQ ID NO: 123 - DNA, 256 bp, Homo Sapiens
  misc_feature (94)..(94): n is a, c, g, or t
  misc_feature (132)..(132): n is a, c, g, or t
  misc_feature (141)..(141): n is a, c, g, or t
  misc_feature (145)..(145): n is a, c, g, or t
  misc_feature (148)..(148): n is a, c, g, or t
  misc_feature (160)..(160): n is a, c, g, or t
  misc_feature (168)..(168): n is a, c, g, or t
  misc_feature (183)..(183): n is a, c, g, or t
  misc_feature (193)..(193): n is a, c, g, or t
  misc_feature (197)..(197): n is a, c, g, or t
  misc_feature (212)..(212): n is a, c, g, or t
  misc_feature (214)..(214): n is a, c, g, or t
  misc_feature (227)..(227): n is a, c, g, or t
  misc_feature (232)..(232): n is a, c, g, or t
  misc_feature (237)..(237): n is a, c, g, or t
  misc_feature (241)..(241): n is a, c, g, or t
  misc_feature (252)..(252): n is a, c, g, or t
aaattagagaaattactatgagaggatcgcatcaccatcaccatcacggatcctatttaggtgacactatagaatcgtcgacccacgcgtccgngagaccaagcgatgagcatgcggaggtgctgggcctcncaaagacgnttcnganagctctcccganacccgagncggggaggaaaagcngcgactcctngctngcatccccgggagcngnactccagactggnccggnagtcngggngtcaggagcanatcc

SEQ ID NO: 124 - DNA, 1200 bp, Homo Sapiens
  misc_feature (1)..(1): n is a, c, g, or t
  misc_feature (513)..(514): n is a, c, g, or t
  misc_feature (517)..(517): n is a, c, g, or t
  misc_feature (523)..(523): n is a, c, g, or t
  misc_feature (529)..(529): n is a, c, g, or t
  misc_feature (540)..(542): n is a, c, g, or t
  misc_feature (544)..(544): n is a, c, g, or t
  misc_feature (549)..(550): n is a, c, g, or t
  misc_feature (552)..(553): n is a, c, g, or t
  misc_feature (555)..(560): n is a, c, g, or t
  misc_feature (562)..(569): n is a, c, g, or t
  misc_feature (571)..(576): n is a, c, g, or t
  misc_feature (578)..(579): n is a, c, g, or t
  misc_feature (581)..(583): n is a, c, g, or t
  misc_feature (585)..(591): n is a, c, g, or t
  misc_feature (597)..(597): n is a, c, g, or t
  misc_feature (599)..(599): n is a, c, g, or t
  misc_feature (613)..(613): n is a, c, g, or t
  misc_feature (615)..(615): n is a, c, g, or t
  misc_feature (619)..(620): n is a, c, g, or t
  misc_feature (631)..(631): n is a, c, g, or t
  misc_feature (643)..(643): n is a, c, g, or t
  misc_feature (645)..(646): n is a, c, g, or t
  misc_feature (651)..(652): n is a, c, g, or t
  misc_feature (661)..(661): n is a, c, g, or t
  misc_feature (664)..(664): n is a, c, g, or t
  misc_feature (681)..(681): n is a, c, g, or t
  misc_feature (684)..(685): n is a, c, g, or t
  misc_feature (705)..(705): n is a, c, g, or t
  misc_feature (720)..(721): n is a, c, g, or t
  misc_feature (728)..(728): n is a, c, g, or t
  misc_feature (732)..(733): n is a, c, g, or t
  misc_feature (739)..(739): n is a, c, g, or t
  misc_feature (743)..(743): n is a, c, g, or t
  misc_feature (764)..(764): n is a, c, g, or t
  misc_feature (768)..(768): n is a, c, g, or t
  misc_feature (774)..(774): n is a, c, g, or t
  misc_feature (795)..(795): n is a, c, g, or t
  misc_feature (806)..(806): n is a, c, g, or t
  misc_feature (827)..(827): n is a, c, g, or t
  misc_feature (831)..(831): n is a, c, g, or t
  misc_feature (841)..(841): n is a, c, g, or t
  misc_feature (843)..(843): n is a, c, g, or t
  misc_feature (854)..(854): n is a, c, g, or t
  misc_feature (859)..(860): n is a, c, g, or t
  misc_feature (864)..(864): n is a, c, g, or t
  misc_feature (868)..(868): n is a, c, g, or t
  misc_feature (872)..(872): n is a, c, g, or t
  misc_feature (875)..(875): n is a, c, g, or t
  misc_feature (877)..(877): n is a, c, g, or t
  misc_feature (882)..(882): n is a, c, g, or t
  misc_feature (894)..(894): n is a, c, g, or t
  misc_feature (898)..(898): n is a, c, g, or t
  misc_feature (909)..(909): n is a, c, g, or t
  misc_feature (914)..(914): n is a, c, g, or t
  misc_feature (931)..(931): n is a, c, g, or t
  misc_feature (944)..(944): n is a, c, g, or t
  misc_feature (949)..(949): n is a, c, g, or t
  misc_feature (951)..(951): n is a, c, g, or t
  misc_feature (966)..(966): n is a, c, g, or t
  misc_feature (977)..(977): n is a, c, g, or t
  misc_feature (980)..(980): n is a, c, g, or t
  misc_feature (983)..(983): n is a, c, g, or t
  misc_feature (1001)..(1001): n is a, c, g, or t
  misc_feature (1003)..(1003): n is a, c, g, or t
  misc_feature (1011)..(1011): n is a, c, g, or t
  misc_feature (1017)..(1018): n is a, c, g, or t
  misc_feature (1026)..(1026): n is a, c, g, or t
  misc_feature (1028)..(1028): n is a, c, g, or t
  misc_feature (1030)..(1030): n is a, c, g, or t
  misc_feature (1046)..(1046): n is a, c, g, or t
  misc_feature (1051)..(1051): n is a, c, g, or t
  misc_feature (1063)..(1064): n is a, c, g, or t
  misc_feature (1072)..(1072): n is a, c, g, or t
  misc_feature (1077)..(1077): n is a, c, g, or t
  misc_feature (1079)..(1079): n is a, c, g, or t
  misc_feature (1082)..(1083): n is a, c, g, or t
  misc_feature (1094)..(1095): n is a, c, g, or t
  misc_feature (1098)..(1098): n is a, c, g, or t
  misc_feature (1101)..(1101): n is a, c, g, or t
  misc_feature (1106)..(1106): n is a, c, g, or t
  misc_feature (1117)..(1117): n is a, c, g, or t
  misc_feature (1120)..(1120): n is a, c, g, or t
  misc_feature (1130)..(1130): n is a, c, g, or t
  misc_feature (1135)..(1135): n is a, c, g, or t
  misc_feature (1146)..(1148): n is a, c, g, or t
  misc_feature (1155)..(1158): n is a, c, g, or t
  misc_feature (1160)..(1160): n is a, c, g, or t
  misc_feature (1162)..(1162): n is a, c, g, or t
  misc_feature (1169)..(1169): n is a, c, g, or t
  misc_feature (1174)..(1174): n is a, c, g, or t
  misc_feature (1184)..(1184): n is a, c, g, or t
  misc_feature (1188)..(1189): n is a, c, g, or t
  misc_feature (1200)..(1200): n is a, c, g, or t
naattagagaaattactatgagaggatcgcatcaccatcaccatcacggatcctatttaggtgacactatagaatcgtcgacccacgcgtccgccaagatgccgcccaaaggaaaaagtggttctggaaaagcggggaaagggggagcagcctctgggagtgacagtgctgacaagaaggctcaaggtcccaaaggtggtggcaatgcagtaaaggtcagacacattctatgtgaaaaacatggcaaaatcatggaagccatggaaaagttaaagtctgggatgagattcaatgaagtggccgcacagtatagtgaagataaagccaggcaagggggtgacttgggttggatgaccagagggtccatggtgggaccatttcaagaagcagcatttgccttgcctgtaagtgggatggataagcctgtgtttacagacccaccggttaagacaaaatttggatatcatattattatggtcgaaggaagaaaataaaatcatatgaaagactgannaanaaaaanaaaaanaaaaaaaaaannnanaaaannannannnnnnannnnnnnnannnnnnannannnannnnnnnaggggngncccccccctatagngngccnnattaaccttanttacctgacctngnnccccnnttgaaaaanccngtaatgcccccaaaacnccnnctggattttttcaaaacccncggttgcccccgggnnttttttnttgnngaaaanccancctaccttggcgaaattttcngganctaggnacctaaaatggaaaaaaaaanccctggatatncccccgttgaaatttccccanggcntcctaaaaanantttttggggcntttcnncccnttgncccnagngncccanaaacccaacccnttcncctggaaaatnacccncccttttttaaaacccnaaaaaaaaaaaanccccnantttttttccgggccntttttttcccnttnttnccccccccgaaaaaaagncncccccccnaaattnnttttgggnantnaaaaaaacggggaccnggggnaatgggaaaaannttcccccnttttnanccnnttttcctgaannaanatnaaaantttttctcccnccnggaggaaaanccccnaaaatttccgnnngtttttnnnnananttccccnaaaangggggggttncggnnaaaacccgccn

SEQ ID NO: 125 - DNA, 1223 bp, Homo Sapiens
  misc_feature (929)..(929): n is a, c, g, or t
  misc_feature (957)..(957): n is a, c, g, or t
  misc_feature (965)..(965): n is a, c, g, or t
  misc_feature (1008)..(1008): n is a, c, g, or t
  misc_feature (1015)..(1015): n is a, c, g, or t
  misc_feature (1032)..(1032): n is a, c, g, or t
  misc_feature (1041)..(1041): n is a, c, g, or t
  misc_feature (1051)..(1051): n is a, c, g, or t
  misc_feature (1067)..(1067): n is a, c, g, or t
  misc_feature (1094)..(1094): n is a, c, g, or t
  misc_feature (1105)..(1105): n is a, c, g, or t
  misc_feature (1121)..(1121): n is a, c, g, or t
  misc_feature (1125)..(1125): n is a, c, g, or t
  misc_feature (1131)..(1131): n is a, c, g, or t
  misc_feature (1142)..(1142): n is a, c, g, or t
  misc_feature (1147)..(1147): n is a, c, g, or t
  misc_feature (1156)..(1156): n is a, c, g, or t
  misc_feature (1159)..(1159): n is a, c, g, or t
  misc_feature (1164)..(1164): n is a, c, g, or t
  misc_feature (1169)..(1169): n is a, c, g, or t
  misc_feature (1172)..(1172): n is a, c, g, or t
  misc_feature (1191)..(1191): n is a, c, g, or t
  misc_feature (1193)..(1193): n is a, c, g, or t
  misc_feature (1203)..(1204): n is a, c, g, or t
  misc_feature (1208)..(1208): n is a, c, g, or t
  misc_feature (1212)..(1212): n is a, c, g, or t
  misc_feature (1223)..(1223): n is a, c, g, or t
gagaaattaactatggagaggatcgcatcaccatcaccatcacggatcctatttaggtgacactatagaatcgtcgacccacgcgtccgctcattgtcataatgtaaaacctcctgttcggtcttgtgataatggtcactgtatgctgaatggaacacatggtccatcttcagagaagaaatcaaacatccctgacttaagcatatatttaaagggtgaagatgcttttgatgccctccctccatctctcccacctcccccacctcctgcaaggcatagtctcattgaacattcaaaacctcctggctccagtagccggccatcctcaggacaggatctttttcttcttccttcagatccctttgttgatctagcaagtggccaagttcctttgcctcctgctagaaggttaccaggtgaaaatgtcaaaactaacagaacatcacaggactatgatcagcttccttcatgttcagatggttcacaggcaccagccagaccccctaaaccacgaccgcgcaggactgcaccagaaattcaccacagaaaaccccatgggcctgaggcggcattggaaaatgtcgatgcaaaaattgcaaaactcatgggagagggttatgcctttgaagaggtgaagagagccttagagatagcccagaataatgtcgaagttgcccggagcatcctccgagaatttgccttccctcctccagtatccccacgtctaaatctatagcagccagaactgtagacaccaaaatggaaagcaatcgatgtattccaagagtgtggaaataaagagaactgagatggaattcaagagagaagtgtctcctcctcgtgtagcagcttgagaagaggcttgggagtgcagcttctcaaaggagaccgatgcttgctcaggatgtcgacagctgtggcttccttgnttttgctagccatattttaaatcagggntgaactgnacaaaaataatttaagacgtttacttccctggaacttgaaccngggaaangctttacttgtttacgnttggcaaantgcagttggntctggttttagttaantttggtttgggggtttgaaaccggacngggttctcaanaccctttgaacggggncagnctgtgnaaatttccccnaattnttggggccnatnaaagntaatnttntctaaggattttccccccngnctgccaggcnnttcntttnctttcaaaagn

SEQ ID NO: 126 - DNA, 256 bp, Homo Sapiens
gagaattaactatgagaggatcgcatcaccatcaccatcacggatcctatttaggtgacactatagaatcgtcgacccacgcgtccggctgccaactctcgcactctgttcttccgccgctccgccgtcgcgtttctctgccggtcgcaatggaagaagagatcgccgcgctggtcattgacaatggctccggcatgtgcaaagctggttttgctggggacgacgctccccgagccgtgtttccttccatcgtcgg

SEQ ID NO: 127 - DNA, 256 bp, Homo Sapiens
  misc_feature (1)..(1): n is a, c, g, or t
  misc_feature (3)..(3): n is a, c, g, or t
nanctatgagaggatcgcatcaccatcaccatcacggatcctatttaggtgacactatagaatcgtcgacccacgcgtccgacctgacagaattccagaccaacctggtgccctatccccgcatccacttccctctggccacatatgcccctgtcatctctgctgagaaagcctaccatgaacagctttctgtagcagagatcaccaatgcttgctttgagccagccaaccagatggtgaaatgtgaccctcgcca

SEQ ID NO: 128 - DNA, 1203 bp, Homo Sapiens
  misc_feature (1)..(1): n is a, c, g, or t
  misc_feature (897)..(897): n is a, c, g, or t
  misc_feature (917)..(917): n is a, c, g, or t
  misc_feature (963)..(963): n is a, c, g, or t
  misc_feature (980)..(980): n is a, c, g, or t
  misc_feature (995)..(995): n is a, c, g, or t
  misc_feature (1004)..(1005): n is a, c, g, or t
  misc_feature (1010)..(1010): n is a, c, g, or t
  misc_feature (1014)..(1014): n is a, c, g, or t
  misc_feature (1027)..(1027): n is a, c, g, or t
  misc_feature (1034)..(1034): n is a, c, g, or t
  misc_feature (1047)..(1047): n is a, c, g, or t
  misc_feature (1055)..(1055): n is a, c, g, or t
  misc_feature (1070)..(1070): n is a, c, g, or t
  misc_feature (1073)..(1073): n is a, c, g, or t
  misc_feature (1077)..(1077): n is a, c, g, or t
  misc_feature (1105)..(1105): n is a, c, g, or t
  misc_feature (1107)..(1107): n is a, c, g, or t
  misc_feature (1109)..(1109): n is a, c, g, or t
  misc_feature (1112)..(1112): n is a, c, g, or t
  misc_feature (1116)..(1116): n is a, c, g, or t
  misc_feature (1119)..(1119): n is a, c, g, or t
  misc_feature (1130)..(1130): n is a, c, g, or t
  misc_feature (1134)..(1134): n is a, c, g, or t
  misc_feature (1137)..(1137): n is a, c, g, or t
  misc_feature (1143)..(1143): n is a, c, g, or t
  misc_feature (1156)..(1157): n is a, c, g, or t
  misc_feature (1159)..(1159): n is a, c, g, or t
  misc_feature (1172)..(1172): n is a, c, g, or t
  misc_feature (1176)..(1177): n is a, c, g, or t
  misc_feature (1183)..(1183): n is a, c, g, or t
  misc_feature (1195)..(1195): n is a, c, g, or t
  misc_feature (1198)..(1198): n is a, c, g, or t
nttagagaaattactatgagaggatcgcatcaccatcaccatcacggaatcctatttaggtgacactatagaatcgtcgacccacgcgtccggaacaaaacgagaaaacataaaggaaaagcgaaaggctatcttagaggcaagacttgccaaacttcgacaaaaaaagatgaaaaaatcaaaagaaggtggaacagaagaagaaaatagagatggagatgttattgggcctttgccaccggagccagaggctgtgccaaccccacgtcctgctgcccagagtagcaaagtagaagtcattgtccaggagaggaaggacaccaagcctggagtgccacacatccgggagtgggaccgcggaaaagaattttcctttggatactggtcgaagaggcagtcagatctccgggctgagagagatcctgagtttgccccgccgtcagattactttgtgggtcagaagagaactggtttttccagcagccaggcatggagcagacctgggccagcacagagtgacccagggcagtgccctgaccagagccacggacctagccctgaacatacgtcacccactcctgcccccgacaacccaccacaagcccccacagttactttcaaaactctggatgacatgatttcctattacaaacaagtgacatgatctttcaaaaaaaaaaaaaaaaaaaaaagggcggccgctccctatagtgagtcgtattaagcttaattagctgagcttggactcctgttgatagatccagtaatgacctcagaactccatctggatttgttcagaacgctcggttgccgccgggcgttttttattggtgagaatccaagctagcttggcgagattttcaggagctaaggaagctaaaatggagaaaaaaatcnctggatataccaccgttganatatcccaatggcatcgtaaaagaacattttgaggcatttcagtcngttgctcaatgtacctntaaccagaaccgttncagctggannttacngccntttttaaagaccngtaaaanaaaaataagcccnaagttttntccgggccttttttnccnattncttgcccccctgaagaaatgctcctccngnanttncctntgncaatgaaaaancggnganctgggngattttgggaaanngnttccccctttttncccnnttttcntggaacaactgnaancgttt

SEQ ID NO: 129 - DNA, 256 bp, Homo Sapiens
ccacgcgtccgcccacgcgtccgcccacgcgtccgcgtggacagaggaagggcgccgggtctgtgttccgcgcgcacgtgaagcaccgtaaaggcgctgcgcgcctgcgcgccgtggatttcgctgagcggcacggctacatcaagggcatcgtcaaggacatcatccacgacccgggccgcggcgcgcccctcgccaaggtggtcttccgggatccgtatcggtttaagaagcggacggagctgttcattgccgc

SEQ ID NO: 130 - DNA, 256 bp, Homo Sapiens
  misc_feature (3)..(3): n is a, c, g, or t
  misc_feature (5)..(7): n is a, c, g, or t
  misc_feature (12)..(13): n is a, c, g, or t
  misc_feature (20)..(21): n is a, c, g, or t
  misc_feature (28)..(29): n is a, c, g, or t
  misc_feature (33)..(34): n is a, c, g, or t
  misc_feature (37)..(37): n is a, c, g, or t
  misc_feature (39)..(39): n is a, c, g, or t
  misc_feature (51)..(53): n is a, c, g, or t
  misc_feature (56)..(57): n is a, c, g, or t
  misc_feature (60)..(60): n is a, c, g, or t
  misc_feature (63)..(63): n is a, c, g, or t
  misc_feature (66)..(66): n is a, c, g, or t
  misc_feature (70)..(70): n is a, c, g, or t
  misc_feature (76)..(77): n is a, c, g, or t
  misc_feature (79)..(80): n is a, c, g, or t
  misc_feature (82)..(84): n is a, c, g, or t
  misc_feature (86)..(86): n is a, c, g, or t
  misc_feature (88)..(89): n is a, c, g, or t
  misc_feature (91)..(92): n is a, c, g, or t
  misc_feature (94)..(94): n is a, c, g, or t
  misc_feature (98)..(99): n is a, c, g, or t
  misc_feature (104)..(104): n is a, c, g, or t
  misc_feature (110)..(112): n is a, c, g, or t
  misc_feature (114)..(114): n is a, c, g, or t
  misc_feature (117)..(119): n is a, c, g, or t
  misc_feature (125)..(125): n is a, c, g, or t
  misc_feature (128)..(133): n is a, c, g, or t
  misc_feature (135)..(136): n is a, c, g, or t
  misc_feature (141)..(144): n is a, c, g, or t
  misc_feature (146)..(147): n is a, c, g, or t
  misc_feature (150)..(152): n is a, c, g, or t
  misc_feature (159)..(159): n is a, c, g, or t
  misc_feature (162)..(162): n is a, c, g, or t
  misc_feature (164)..(164): n is a, c, g, or t
  misc_feature (166)..(168): n is a, c, g, or t
  misc_feature (170)..(171): n is a, c, g, or t
  misc_feature (174)..(174): n is a, c, g, or t
  misc_feature (178)..(179): n is a, c, g, or t
  misc_feature (185)..(185): n is a, c, g, or t
  misc_feature (187)..(187): n is a, c, g, or t
  misc_feature (189)..(189): n is a, c, g, or t
  misc_feature (191)..(191): n is a, c, g, or t
  misc_feature (194)..(196): n is a, c, g, or t
  misc_feature (198)..(198): n is a, c, g, or t
  misc_feature (206)..(207): n is a, c, g, or t
  misc_feature (211)..(214): n is a, c, g, or t
  misc_feature (218)..(218): n is a, c, g, or t
  misc_feature (220)..(223): n is a, c, g, or t
  misc_feature (225)..(229): n is a, c, g, or t
  misc_feature (232)..(232): n is a, c, g, or t
  misc_feature (234)..(235): n is a, c, g, or t
  misc_feature (238)..(239): n is a, c, g, or t
  misc_feature (241)..(243): n is a, c, g, or t
  misc_feature (245)..(245): n is a, c, g, or t
  misc_feature (250)..(250): n is a, c, g, or t
  misc_feature (252)..(252): n is a, c, g, or t
tgngnnngtatnntggtttnnttatatnntggnncantnatttaaaccttnnnccnnttnccnaancctnaacccnntnntnnnangnntnnangaanntatcnatattnnntnggnnnggggtntcnnnnnnanncccannnntnngannnacccatnttntnannntnnttntgcnncgcttntncngnacnnntnattgcgcnnaacnnnngaangnnnncnnnnnaantnngtnnannnanttatntntcga

SEQ ID NO: 131 - DNA, 256 bp, Homo Sapiens
  misc_feature (1)..(1): n is a, c, g, or t
  misc_feature (3)..(3): n is a, c, g, or t
  misc_feature (6)..(6): n is a, c, g, or t
  misc_feature (12)..(13): n is a, c, g, or t
  misc_feature (15)..(20): n is a, c, g, or t
  misc_feature (23)..(24): n is a, c, g, or t
  misc_feature (36)..(38): n is a, c, g, or t
  misc_feature (41)..(41): n is a, c, g, or t
  misc_feature (47)..(47): n is a, c, g, or t
  misc_feature (49)..(49): n is a, c, g, or t
  misc_feature (51)..(51): n is a, c, g, or t
  misc_feature (56)..(62): n is a, c, g, or t
  misc_feature (68)..(69): n is a, c, g, or t
  misc_feature (80)..(82): n is a, c, g, or t
  misc_feature (84)..(86): n is a, c, g, or t
  misc_feature (90)..(90): n is a, c, g, or t
  misc_feature (95)..(95): n is a, c, g, or t
  misc_feature (97)..(97): n is a, c, g, or t
  misc_feature (108)..(108): n is a, c, g, or t
  misc_feature (111)..(111): n is a, c, g, or t
  misc_feature (115)..(115): n is a, c, g, or t
  misc_feature (122)..(122): n is a, c, g, or t
  misc_feature (129)..(129): n is a, c, g, or t
  misc_feature (132)..(132): n is a, c, g, or t
  misc_feature (134)..(134): n is a, c, g, or t
  misc_feature (139)..(139): n is a, c, g, or t
  misc_feature (148)..(148): n is a, c, g, or t
  misc_feature (150)..(152): n is a, c, g, or t
  misc_feature (162)..(162): n is a, c, g, or t
  misc_feature (166)..(166): n is a, c, g, or t
  misc_feature (168)..(170): n is a, c, g, or t
  misc_feature (172)..(173): n is a, c, g, or t
  misc_feature (178)..(178): n is a, c, g, or t
  misc_feature (181)..(182): n is a, c, g, or t
  misc_feature (186)..(187): n is a, c, g, or t
  misc_feature (197)..(197): n is a, c, g, or t
  misc_feature (205)..(205): n is a, c, g, or t
  misc_feature (211)..(211): n is a, c, g, or t
  misc_feature (217)..(218): n is a, c, g, or t
  misc_feature (226)..(227): n is a, c, g, or t
  misc_feature (230)..(230): n is a, c, g, or t
  misc_feature (241)..(242): n is a, c, g, or t
  misc_feature (247)..(247): n is a, c, g, or t
  misc_feature (256)..(256): n is a, c, g, or t
ngncgngggggnnannnnnnggnngggggcgggggnnnggngggggncntngtggnnnnnnngggggnngggggattggnnngnnngganggggngntgggggttggnggnttgntttgttntttattnggngntgggngggagaggngnnngatggttagngggngnnncnntcttnttnncggnngcgggctaangggatatntacctncccggnngtggggcnnggnggcgtgtgggnngcggnattgtgggn

SEQ ID NO: 132 - DNA, 1370 bp, Homo Sapiens
  misc_feature (1)..(1): n is a, c, g, or t
  misc_feature (898)..(898): n is a, c, g, or t
  misc_feature (923)..(923): n is a, c, g, or t
  misc_feature (979)..(979): n is a, c, g, or t
  misc_feature (994)..(994): n is a, c, g, or t
  misc_feature (1016)..(1016): n is a, c, g, or t
  misc_feature (1019)..(1019): n is a, c, g, or t
  misc_feature (1021)..(1021): n is a, c, g, or t
  misc_feature (1028)..(1028): n is a, c, g, or t
  misc_feature (1031)..(1031): n is a, c, g, or t
  misc_feature (1045)..(1045): n is a, c, g, or t
  misc_feature (1052)..(1052): n is a, c, g, or t
  misc_feature (1054)..(1054): n is a, c, g, or t
  misc_feature (1056)..(1056): n is a, c, g, or t
  misc_feature (1061)..(1061): n is a, c, g, or t
  misc_feature (1065)..(1065): n is a, c, g, or t
  misc_feature (1071)..(1072): n is a, c, g, or t
  misc_feature (1101)..(1101): n is a, c, g, or t
  misc_feature (1103)..(1104): n is a, c, g, or t
  misc_feature (1112)..(1112): n is a, c, g, or t
  misc_feature (1116)..(1116): n is a, c, g, or t
  misc_feature (1119)..(1119): n is a, c, g, or t
  misc_feature (1130)..(1130): n is a, c, g, or t
  misc_feature (1146)..(1146): n is a, c, g, or t
  misc_feature (1148)..(1148): n is a, c, g, or t
  misc_feature (1150)..(1151): n is a, c, g, or t
  misc_feature (1156)..(1156): n is a, c, g, or t
  misc_feature (1166)..(1166): n is a, c, g, or t
  misc_feature (1172)..(1172): n is a, c, g, or t
  misc_feature (1183)..(1183): n is a, c, g, or t
  misc_feature (1185)..(1186): n is a, c, g, or t
  misc_feature (1191)..(1191): n is a, c, g, or t
  misc_feature (1194)..(1194): n is a, c, g, or t
  misc_feature (1198)..(1198): n is a, c, g, or t
  misc_feature (1201)..(1201): n is a, c, g, or t
  misc_feature (1203)..(1203): n is a, c, g, or t
  misc_feature (1212)..(1214): n is a, c, g, or t
  misc_feature (1220)..(1221): n is a, c, g, or t
  misc_feature (1223)..(1224): n is a, c, g, or t
  misc_feature (1230)..(1230): n is a, c, g, or t
  misc_feature (1232)..(1232): n is a, c, g, or t
  misc_feature (1235)..(1235): n is a, c, g, or t
  misc_feature (1239)..(1240): n is a, c, g, or t
  misc_feature (1242)..(1242): n is a, c, g, or t
  misc_feature (1251)..(1252): n is a, c, g, or t
  misc_feature (1254)..(1255): n is a, c, g, or t
  misc_feature (1273)..(1273): n is a, c, g, or t
  misc_feature (1277)..(1278): n is a, c, g, or t
  misc_feature (1280)..(1280): n is a, c, g, or t
  misc_feature (1290)..(1291): n is a, c, g, or t
  misc_feature (1293)..(1293): n is a, c, g, or t
  misc_feature (1297)..(1297): n is a, c, g, or t
  misc_feature (1305)..(1305): n is a, c, g, or t
  misc_feature (1313)..(1315): n is a, c, g, or t
  misc_feature (1318)..(1319): n is a, c, g, or t
  misc_feature (1321)..(1321): n is a, c, g, or t
  misc_feature (1324)..(1324): n is a, c, g, or t
  misc_feature (1328)..(1328): n is a, c, g, or t
  misc_feature (1331)..(1333): n is a, c, g, or t
  misc_feature (1336)..(1336): n is a, c, g, or t
  misc_feature (1344)..(1345): n is a, c, g, or t
  misc_feature (1354)..(1354): n is a, c, g, or t
  misc_feature (1365)..(1368): n is a, c, g, or t
  misc_feature (1370)..(1370): n is a, c, g, or t
nttagagaaattactatgagaggatcgcatcaccatcaccatcacggatcctatttaggtgacactatagaatcgtcgacccacgcgtccgagcgcggcgctgggaggagctgctgcagcggggcgcggcgcagctggcggagctcgggccaccgggcgtggggggcgtcggggcctgcaagctcggtcccggcaagggctctcgcaagaagagcaaatctccaaaatgatggagctggccagagagaaacaggcggcagagctgaaggccctgaaggagacgtcggagaagtacgactgcctccctcccacacctgcttcgcctcccagcaagggctcagccgcacaaaacagctccttcatgcctgtctctctgcagcgacaccaaagagatgaagaaaaagctggagacaaagagactggagcggatccagggcatgaccaaagtcaccacagacaagatggcccaggagagatgacggagaacttggagaggcaccaggagaagctggaggagaagcaggcggcttgcctggaacagatacgggagatggaaaagcagttccagaaggaggcgctggcagagtacgaggccaggatgaagggtctggaggcagaggtgaaggagtcggtgagggcctgcctcaggacctgctttccctccgaggccaaggacaagcctgagagggcctgcgagtgccccccagagctgtgtgagcaggacccactcatagcaaaggcagatgcccaggagagccgcctctgatgcccccatcccactgggacatttagcaaggaggttcagccccttctctgggatgtggttctattcccccaggaaaaaggagccccagccttctgaggctgtgggaacctgtggctgccttggacgctgcanccccctcctcacggccaggccaaantctgaaacaggacccaggcacccttcacggcagggcctctcttggggcctaaaaantcttctcaagctganttcctacctccccctccatctntananaatgtcnatnttttgttgaaggcnaaaaatntngnatggnaagncaaaanngggatcttggccccctttgcctttctatnannaacaactntggnttntttctccctgnaggttggacccttccntncnntttancccaaccttntgcccngtttcagcccntnnggctnccnaatngcntntccctcttnnnaaatcnngnnttctcnantcntggnngncctcctggnnannccccctcctttcttttcnaaannantaaaaaaaanntntttncttttttnaaaaaggnnnggnntnggntttnccnnnggncccctttnnggggggggnttttttttctnnnntn

SEQ ID NO: 133 - DNA, 256 bp, Homo Sapiens
  misc_feature (2)..(2): n is a, c, g, or t
  misc_feature (4)..(4): n is a, c, g, or t
tnanaggagaattaactatgagaggatcgcatcaccatcaccatcacggatcctatttaggtgacactatagaatcgtcgacccacgcgtccggcacaagagaagcacacacaggtgtctgtgttcttggctgcagcccgcatgggccaaggagttcagatccagtgccccccacctcccctttcctgccgccatgctctgtaggcttggcccctcctgctgtgatcctgatcacagccttccaccctagagaatt

SEQ ID NO: 134 - DNA, 1356 bp, Homo Sapiens
  misc_feature (960)..(960): n is a, c, g, or t
  misc_feature (980)..(980): n is a, c, g, or t
  misc_feature (983)..(983): n is a, c, g, or t
  misc_feature (991)..(991): n is a, c, g, or t
  misc_feature (1029)..(1029): n is a, c, g, or t
  misc_feature (1041)..(1041): n is a, c, g, or t
  misc_feature (1062)..(1062): n is a, c, g, or t
  misc_feature (1074)..(1074): n is a, c, g, or t
  misc_feature (1076)..(1078): n is a, c, g, or t
  misc_feature (1084)..(1084): n is a, c, g, or t
  misc_feature (1090)..(1090): n is a, c, g, or t
  misc_feature (1101)..(1101): n is a, c, g, or t
  misc_feature (1107)..(1107): n is a, c, g, or t
  misc_feature (1114)..(1114): n is a, c, g, or t
  misc_feature (1142)..(1143): n is a, c, g, or t
  misc_feature (1145)..(1145): n is a, c, g, or t
  misc_feature (1149)..(1149): n is a, c, g, or t
  misc_feature (1153)..(1153): n is a, c, g, or t
  misc_feature (1156)..(1156): n is a, c, g, or t
  misc_feature (1161)..(1161): n is a, c, g, or t
  misc_feature (1178)..(1178): n is a, c, g, or t
  misc_feature (1192)..(1192): n is a, c, g, or t
  misc_feature (1200)..(1200): n is a, c, g, or t
  misc_feature (1203)..(1203): n is a, c, g, or t
  misc_feature (1210)..(1210): n is a, c, g, or t
  misc_feature (1216)..(1216): n is a, c, g, or t
  misc_feature (1222)..(1222): n is a, c, g, or t
  misc_feature (1238)..(1238): n is a, c, g, or t
  misc_feature (1260)..(1260): n is a, c, g, or t
  misc_feature (1271)..(1271): n is a, c, g, or t
  misc_feature (1278)..(1278): n is a, c, g, or t
  misc_feature (1282)..(1282): n is a, c, g, or t
  misc_feature (1285)..(1285): n is a, c, g, or t
  misc_feature (1287)..(1289): n is a, c, g, or t
  misc_feature (1291)..(1291): n is a, c, g, or t
  misc_feature (1293)..(1293): n is a, c, g, or t
  misc_feature (1295)..(1295): n is a, c, g, or t
  misc_feature (1297)..(1297): n is a, c, g, or t
  misc_feature (1305)..(1305): n is a, c, g, or t
  misc_feature (1308)..(1308): n is a, c, g, or t
  misc_feature (1311)..(1311): n is a, c, g, or t
  misc_feature (1319)..(1320): n is a, c, g, or t
  misc_feature (1323)..(1324): n is a, c, g, or t
  misc_feature (1336)..(1336): n is a, c, g, or t
  misc_feature (1338)..(1338): n is a, c, g, or t
  misc_feature (1340)..(1340): n is a, c, g, or t
  misc_feature (1348)..(1348): n is a, c, g, or t
  misc_feature (1353)..(1353): n is a, c, g, or t
caatagagagattactatgagaggatcgcatcaccatcaccatcacggatcctatttaggtgacactatagaatcgtcgacccacgcgtccgggtacctgctctgcgaactggtgtctgacgacccccgctgccgcctaagcctcgatgaccgagttctgagcagcctcgtacgggacacgatcgccagggtgcacggaactttcggcgcagccgcctgctccatcggcttcgcgggtgcaagggcgctgggggaagaggggaacccgggaggatggcgggatgtggagggggcaggcgccggaggaagaaagaaggggcacgagtggccaagcccgtgcaccgttttttgtaaggtatctctttaagcgcctgggaccccaagcgagagtccgaaattagcagagcgctaaaaggaggggcccgaaggcagtggggctttgagctagaagcctctttttacctgcttgacaggtaatttctgtaattggttgtgattgaatttgatagggtagagaattaaatgagggaagctgtgtatacttcctagtaagagctattatatgaccgattacattaacatcatatggaaaaaaattgtcaaaagtactccgggaaagcccttaaatagttggtaaagtacagaacacatgattgtcaatatatgtaaatacaggatgagctaggacagaggggcccttctttcacaccacttaaattagttcccactttaaccttgtttgagattgacttctggagagttaaatgcagatagacttaactctcctaagtcaggtgagactgagagctgactgctacaataaattacggagcccaaatgcagtaaaacagcctgtttttcaggcaagggttttgtgggggttttttcctaaaattaaaacggatcgcctcctacctgctcctatttattgaattaactagtgaattaaaaagcatttcnattctaaattcattccccanttntgaatggngtgcaacacagtggggggtttggcttttccctttaacnccctgaaaaatntaagtgcccttgcctaaaaanatactttttggnannnaaatangccctnttaccccaaanttttcnttttttncaaaaaaatctgggctttttcccaagcnngntggnaggnccncaccnaaaacgggggtcattgntgcccccgcccccnggggttcnggnaattccngccccncccccngggggggggaaataanggggcccccccccccccctaanttttttttttntaaaaangggnttntnnntntngnanggggcccnaanccnaaaaaaannatnncccccccccccnangngggaaaanggggnccc

SEQ ID NO: 135 - DNA, 1402 bp, Homo Sapiens
  misc_feature (4)..(5): n is a, c, g, or t
  misc_feature (7)..(7): n is a, c, g, or t
  misc_feature (11)..(11): n is a, c, g, or t
  misc_feature (75)..(77): n is a, c, g, or t
  misc_feature (82)..(82): n is a, c, g, or t
  misc_feature (115)..(115): n is a, c, g, or t
  misc_feature (118)..(118): n is a, c, g, or t
  misc_feature (121)..(123): n is a, c, g, or t
  misc_feature (190)..(190): n is a, c, g, or t
  misc_feature (207)..(207): n is a, c, g, or t
  misc_feature (210)..(210): n is a, c, g, or t
  misc_feature (231)..(231): n is a, c, g, or t
  misc_feature (271)..(271): n is a, c, g, or t
  misc_feature (277)..(277): n is a, c, g, or t
  misc_feature (292)..(292): n is a, c, g, or t
  misc_feature (303)..(303): n is a, c, g, or t
  misc_feature (312)..(312): n is a, c, g, or t
  misc_feature (320)..(320): n is a, c, g, or t
  misc_feature (336)..(336): n is a, c, g, or t
  misc_feature (344)..(344): n is a, c, g, or t
  misc_feature (355)..(355): n is a, c, g, or t
  misc_feature (358)..(359): n is a, c, g, or t
  misc_feature (364)..(364): n is a, c, g, or t
  misc_feature (367)..(367): n is a, c, g, or t
  misc_feature (370)..(370): n is a, c, g, or t
  misc_feature (379)..(379): n is a, c, g, or t
  misc_feature (381)..(382): n is a, c, g, or t
  misc_feature (389)..(389): n is a, c, g, or t
  misc_feature (395)..(395): n is a, c, g, or t
  misc_feature (398)..(398): n is a, c, g, or t
  misc_feature (407)..(407): n is a, c, g, or t
  misc_feature (428)..(428): n is a, c, g, or t
  misc_feature (448)..(448): n is a, c, g, or t
  misc_feature (450)..(450): n is a, c, g, or t
  misc_feature (460)..(463): n is a, c, g, or t
  misc_feature (470)..(470): n is a, c, g, or t
  misc_feature (474)..(474): n is a, c, g, or t
  misc_feature (480)..(480): n is a, c, g, or t
  misc_feature (485)..(486): n is a, c, g, or t
  misc_feature (491)..(491): n is a, c, g, or t
  misc_feature (493)..(493): n is a, c, g, or t
  misc_feature (498)..(500): n is a, c, g, or t
  misc_feature (506)..(506): n is a, c, g, or t
  misc_feature (515)..(515): n is a, c, g, or t
  misc_feature (522)..(522): n is a, c, g, or t
  misc_feature (526)..(527): n is a, c, g, or t
  misc_feature (532)..(533): n is a, c, g, or t
  misc_feature (539)..(539): n is a, c, g, or t
  misc_feature (542)..(542): n is a, c, g, or t
  misc_feature (548)..(548): n is a, c, g, or t
  misc_feature (550)..(550): n is a, c, g, or t
  misc_feature (562)..(562): n is a, c, g, or t
  misc_feature (565)..(565): n is a, c, g, or t
  misc_feature (570)..(570): n is a, c, g, or t
  misc_feature (574)..(575): n is a, c, g, or t
  misc_feature (580)..(580): n is a, c, g, or t
  misc_feature (583)..(583): n is a, c, g, or t
  misc_feature (591)..(591): n is a, c, g, or t
  misc_feature (598)..(598): n is a, c, g, or t
  misc_feature (600)..(600): n is a, c, g, or t
  misc_feature (602)..(602): n is a, c, g, or t
  misc_feature (610)..(611): n is a, c, g, or t
  misc_feature (621)..(621): n is a, c, g, or t
  misc_feature (626)..(626): n is a, c, g, or t
  misc_feature (638)..(638): n is a, c, g, or t
  misc_feature (646)..(646): n is a, c, g, or t
  misc_feature (651)..(652): n is a, c, g, or t
  misc_feature (654)..(654): n is a, c, g, or t
  misc_feature (665)..(665): n is a, c, g, or t
  misc_feature (668)..(668): n is a, c, g, or t
  misc_feature (676)..(676): n is a, c, g, or t
  misc_feature (681)..(681): n is a, c, g, or t
  misc_feature (686)..(686): n is a, c, g, or t
  misc_feature (690)..(690): n is a, c, g, or t
  misc_feature (693)..(693): n is a, c, g, or t
  misc_feature (695)..(695): n is a, c, g, or t
  misc_feature (697)..(698): n is a, c, g, or t
  misc_feature (701)..(701): n is a, c, g, or t
  misc_feature (711)..(711): n is a, c, g, or t
  misc_feature (717)..(717): n is a, c, g, or t
  misc_feature (720)..(720): n is a, c, g, or t
  misc_feature (722)..(722): n is a, c, g, or t
  misc_feature (725)..(725): n is a, c, g, or t
  misc_feature (727)..(727): n is a, c, g, or t
  misc_feature (733)..(733): n is a, c, g, or t
  misc_feature (745)..(745): n is a, c, g, or t
  misc_feature (748)..(748): n is a, c, g, or t
  misc_feature (751)..(751): n is a, c, g, or t
  misc_feature (753)..(753): n is a, c, g, or t
  misc_feature (755)..(755): n is a, c, g, or t
  misc_feature (761)..(761): n is a, c, g, or t
  misc_feature (765)..(766): n is a, c, g, or t
  misc_feature (772)..(774): n is a, c, g, or t
  misc_feature (779)..(779): n is a, c, g, or t
  misc_feature (781)..(781): n is a, c, g, or t
  misc_feature (784)..(784): n is a, c, g, or t
  misc_feature (786)..(789): n is a, c, g, or t
  misc_feature (794)..(794): n is a, c, g, or t
  misc_feature (796)..(796): n is a, c, g, or t
  misc_feature (799)..(799): n is a, c, g, or t
  misc_feature (804)..(804): n is a, c, g, or t
  misc_feature (806)..(806): n is a, c, g, or t
  misc_feature (810)..(811): n is a, c, g, or t
  misc_feature (819)..(821): n is a, c, g, or t
  misc_feature (824)..(824): n is a, c, g, or t
  misc_feature (826)..(828): n is a, c, g, or t
  misc_feature (830)..(831): n is a, c, g, or t
  misc_feature (839)..(841): n is a, c, g, or t
  misc_feature (843)..(843): n is a, c, g, or t
  misc_feature (848)..(848): n is a, c, g, or t
  misc_feature (850)..(851): n is a, c, g, or t
  misc_feature (858)..(859): n is a, c, g, or t
  misc_feature (861)..(861): n is a, c, g, or t
  misc_feature (864)..(865): n is a, c, g, or t
  misc_feature (872)..(874): n is a, c, g, or t
  misc_feature (880)..(880): n is a, c, g, or t
  misc_feature (884)..(884): n is a, c, g, or t
  misc_feature (888)..(889): n is a, c, g, or t
  misc_feature (891)..(891): n is a, c, g, or t
  misc_feature (894)..(895): n is a, c, g, or t
  misc_feature (900)..(900): n is a, c, g, or t
  misc_feature (923)..(923): n is a, c, g, or t
  misc_feature (927)..(927): n is a, c, g, or t
  misc_feature (933)..(933): n is a, c, g, or t
  misc_feature (935)..(935): n is a, c, g, or t
  misc_feature (939)..(941): n is a, c, g, or t
  misc_feature (943)..(944): n is a, c, g, or t
  misc_feature (946)..(946): n is a, c, g, or t
  misc_feature (954)..(955): n is a, c, g, or t
  misc_feature (958)..(959): n is a, c, g, or t
  misc_feature (961)..(961): n is a, c, g, or t
  misc_feature (967)..(967): n is a, c, g, or t
  misc_feature (969)..(969): n is a, c, g, or t
  misc_feature (971)..(974): n is a, c, g, or t
  misc_feature (977)..(978): n is a, c, g, or t
  misc_feature (981)..(981): n is a, c, g, or t
  misc_feature (985)..(987): n is a, c, g, or t
  misc_feature (991)..(992): n is a, c, g, or t
  misc_feature (995)..(998): n is a, c, g, or t
  misc_feature (1003)..(1003): n is a, c, g, or t
  misc_feature (1005)..(1006): n is a, c, g, or t
  misc_feature (1008)..(1008): n is a, c, g, or t
  misc_feature (1010)..(1011): n is a, c, g, or t
  misc_feature (1013)..(1013): n is a, c, g, or t
  misc_feature (1015)..(1016): n is a, c, g, or t
  misc_feature (1018)..(1018): n is a, c, g, or t
  misc_feature (1023)..(1023): n is a, c, g, or t
  misc_feature (1026)..(1027): n is a, c, g, or t
  misc_feature (1031)..(1032): n is a, c, g, or t
  misc_feature (1034)..(1038): n is a, c, g, or t
  misc_feature (1041)..(1042): n is a, c, g, or t
  misc_feature (1047)..(1047): n is a, c, g, or t
  misc_feature (1051)..(1051): n is a, c, g, or t
  misc_feature (1053)..(1053): n is a, c, g, or t
  misc_feature (1057)..(1057): n is a, c, g, or t
  misc_feature (1062)..(1062): n is a, c, g, or t
  misc_feature (1065)..(1065): n is a, c, g, or t
  misc_feature (1067)..(1067): n is a, c, g, or t
  misc_feature (1070)..(1070): n is a, c, g, or t
  misc_feature (1074)..(1074): n is a, c, g, or t
  misc_feature (1076)..(1076): n is a, c, g, or t
  misc_feature (1078)..(1078): n is a, c, g, or t
  misc_feature (1082)..(1084): n is a, c, g, or t
  misc_feature (1087)..(1089): n is a, c, g, or t
  misc_feature (1092)..(1093): n is a, c, g, or t
  misc_feature (1095)..(1095): n is a, c, g, or t
  misc_feature (1098)..(1100): n is a, c, g, or t
  misc_feature (1105)..(1107): n is a, c, g, or t
  misc_feature (1110)..(1110): n is a, c, g, or t
  misc_feature (1115)..(1115): n is a, c, g, or t
  misc_feature (1121)..(1121): n is a, c, g, or t
  misc_feature (1128)..(1128): n is a, c, g, or t
  misc_feature (1130)..(1130): n is a, c, g, or t
  misc_feature (1134)..(1134): n is a, c, g, or t
  misc_feature (1140)..(1140): n is a, c, g, or t
  misc_feature (1143)..(1143): n is a, c, g, or t
  misc_feature (1150)..(1150): n is a, c, g, or t
  misc_feature (1158)..(1158): n is a, c, g, or t
  misc_feature (1161)..(1163): n is a, c, g, or t
  misc_feature (1165)..(1165): n is a, c, g, or t
  misc_feature (1170)..(1170): n is a, c, g, or t
  misc_feature (1176)..(1176): n is a, c, g, or t
  misc_feature (1178)..(1180): n is a, c, g, or t
  misc_feature (1182)..(1182): n is a, c, g, or t
  misc_feature (1185)..(1190): n is a, c, g, or t
  misc_feature (1192)..(1192): n is a, c, g, or t
  misc_feature (1197)..(1197): n is a, c, g, or t
  misc_feature (1199)..(1199): n is a, c, g, or t
  misc_feature (1201)..(1201): n is a, c, g, or t
  misc_feature (1204)..(1205): n is a, c, g, or t
  misc_feature (1207)..(1207): n is a, c, g, or t
  misc_feature (1209)..(1211): n is a, c, g, or t
  misc_feature (1214)..(1216): n is a, c, g, or t
  misc_feature (1219)..(1219): n is a, c, g, or t
  misc_feature (1224)..(1226): n is a, c, g, or t
  misc_feature (1231)..(1231): n is a, c, g, or t
  misc_feature (1233)..(1233): n is a, c, g, or t
  misc_feature (1236)..(1236): n is a, c, g, or t
  misc_feature (1238)..(1238): n is a, c, g, or t
  misc_feature (1249)..(1249): n is a, c, g, or t
  misc_feature (1256)..(1256): n is a, c, g, or t
  misc_feature (1258)..(1260): n is a, c, g, or t
  misc_feature (1262)..(1263): n is a, c, g, or t
  misc_feature (1266)..(1267): n is a, c, g, or t
  misc_feature (1269)..(1270): n is a, c, g, or t
  misc_feature (1272)..(1272): n is a, c, g, or t
  misc_feature (1274)..(1275): n is a, c, g, or t
  misc_feature (1278)..(1278): n is a, c, g, or t
  misc_feature (1281)..(1281): n is a, c, g, or t
  misc_feature (1285)..(1285): n is a, c, g, or t
  misc_feature (1287)..(1287): n is a, c, g, or t
  misc_feature (1289)..(1289): n is a, c, g, or t
  misc_feature (1291)..(1291): n is a, c, g, or t
  misc_feature (1295)..(1295): n is a, c, g, or t
  misc_feature (1298)..(1298): n is a, c, g, or t
  misc_feature (1300)..(1304): n is a, c, g, or t
  misc_feature (1306)..(1306): n is a, c, g, or t
  misc_feature (1310)..(1311): n is a, c, g, or t
  misc_feature (1313)..(1314): n is a, c, g, or t
  misc_feature (1317)..(1317): n is a, c, g, or t
  misc_feature (1322)..(1322): n is a, c, g, or t
  misc_feature (1325)..(1327): n is a, c, g, or t
  misc_feature (1331)..(1332): n is a, c, g, or t
  misc_feature (1337)..(1337): n is a, c, g, or t
  misc_feature (1339)..(1339): n is a, c, g, or t
  misc_feature (1344)..(1344): n is a, c, g, or t
  misc_feature (1346)..(1348): n is a, c, g, or t
  misc_feature (1350)..(1352): n is a, c, g, or t
  misc_feature (1355)..(1355): n is a, c, g, or t
  misc_feature (1359)..(1360): n is a, c, g, or t
  misc_feature (1362)..(1362): n is a, c, g, or t
  misc_feature (1368)..(1370): n is a, c, g, or t
  misc_feature (1372)..(1372): n is a, c, g, or t
  misc_feature (1374)..(1375): n is a, c, g, or t
  misc_feature (1377)..(1377): n is a, c, g, or t
  misc_feature (1384)..(1385): n is a, c, g, or t
  misc_feature (1387)..(1387): n is a, c, g, or t
  misc_feature (1389)..(1390): n is a, c, g, or t
  misc_feature (1395)..(1398): n is a, c, g, or t
aggnnanaagngagaatactatgagaggatcgcatcaccatcaccatcacgggatcctatttaggtgacaccatnnnaaacnctcgacccacgcgtccgcccacgcgtccgcccnctnaannnccgctgccgtccgcatgctcccgacgcggagcccggagcccgcgccgagcccctggcctcgcggtgncatgctgccccggcggnggngctgaaggatggcgacgccgntgcgtccgccctcccggcggtgccagcggctgctgcggcngctgcnctccggactcggccncggcgccgccntgcgtgganccgccgcnggacacccggaggtangcgcccgncccgggagccnggnntgtgnccngangaggcgggnanngtgaccncctggngcncatgccggngagggcctgctgttcagcccntaaggaggaccagcacgggntntggggggggnnnnaaacacncgcntgccangaggnngacangncccgnnngaactnggaagaggntactganctcnnggacnngggacntgncgaggnanggactccggagngtncaccntccnncccgnacncaaagganccaacgntngncctcccgnnaggccgccancccgngagtctgagcangggagacnggggnnanggaatctgggncgnggccgccngaacnggagnaaantangncnnaanagccaaaaanagcctnagntntgncnctgggntgaaaccggaancgngcngnancagggngggnngacatnnnacccngnggngnnnntttanangcnagacngnaaanngtcccacnnnacngnnncnntgccgctnnncnatggncnnaaagagnnangcnncccgagnnnaaaccnggcntganncnggnnggggngccccaaccccaccaatgcgggngganaaaagncnccgnnnanncnaccacggnnccnncngggcgngnannnnacnngtngggnnncacnngannnnccgcngnngnanntncnngntaaangcnnggtnntnnnnngcnngacgnttantncctnggggnganangancccnancntagnnnggnnnagnntnttnnngggannnganaggcncctagncgggggnanctcncccccnggnggagcgnctcgacgnggnnngnccccncagggntnnngncannnnnntnccaangncnctnntncnnncgnnncgngggannncacancnaancnctaaccggagncccattnannngnncanncnncnannaanagngganancnanggcncancnnnnnangcanntnnccngcgtnatnnncgcnngcaancncagtncnnngnnnaangggnnancgggannnangnngngcacagnntntnnctcannnntgcg

SEQ ID NO: 136 - DNA, 256 bp, Homo Sapiens
atccccagaagtttgcactttttaagcggatacacaaggacggacaagtgctcttccagaaactctccattgctgaccgccccctctacctgcgcctgcttgctgggcctgacacggaggtcctcagctttgtgctaaaggagaatgaaactggagaggtagagtgggatgccttctccatccctgaacttcagaacttcctaacaatcctggaaaaagaggagcaggacaaaatccaacaagtgcaaaagaagta

SEQ ID NO: 137 - DNA, 1419 bp, Homo Sapiens
  misc_feature (750)..(750): n is a, c, g, or t
  misc_feature (755)..(755): n is a, c, g, or t
  misc_feature (783)..(783): n is a, c, g, or t
  misc_feature (824)..(824): n is a, c, g, or t
  misc_feature (834)..(834): n is a, c, g, or t
  misc_feature (859)..(859): n is a, c, g, or t
  misc_feature (876)..(876): n is a, c, g, or t
  misc_feature (899)..(901): n is a, c, g, or t
  misc_feature (905)..(905): n is a, c, g, or t
  misc_feature (907)..(907): n is a, c, g, or t
  misc_feature (914)..(914): n is a, c, g, or t
  misc_feature (930)..(930): n is a, c, g, or t
  misc_feature (939)..(939): n is a, c, g, or t
  misc_feature (946)..(946): n is a, c, g, or t
  misc_feature (948)..(948): n is a, c, g, or t
  misc_feature (986)..(986): n is a, c, g, or t
  misc_feature (988)..(988): n is a, c, g, or t
  misc_feature (993)..(993): n is a, c, g, or t
  misc_feature (1000)..(1000): n is a, c, g, or t
  misc_feature (1002)..(1002): n is a, c, g, or t
  misc_feature (1004)..(1004): n is a, c, g, or t
  misc_feature (1010)..(1010): n is a, c, g, or t
  misc_feature (1027)..(1027): n is a, c, g, or t
  misc_feature (1037)..(1037): n is a, c, g, or t
  misc_feature (1044)..(1044): n is a, c, g, or t
  misc_feature (1047)..(1047): n is a, c, g, or t
  misc_feature (1049)..(1049): n is a, c, g, or t
  misc_feature (1052)..(1052): n is a, c, g, or t
  misc_feature (1061)..(1061): n is a, c, g, or t
  misc_feature (1065)..(1065): n is a, c, g, or t
  misc_feature (1072)..(1074): n is a, c, g, or t
  misc_feature (1080)..(1080): n is a, c, g, or t
  misc_feature (1087)..(1087): n is a, c, g, or t
  misc_feature (1090)..(1090): n is a, c, g, or t
  misc_feature (1092)..(1092): n is a, c, g, or t
  misc_feature (1094)..(1095): n is a, c, g, or t
  misc_feature (1101)..(1101): n is a, c, g, or t
  misc_feature (1114)..(1116): n is a, c, g, or t
  misc_feature (1129)..(1129): n is a, c, g, or t
  misc_feature (1139)..(1139): n is a, c, g, or t
  misc_feature (1142)..(1142): n is a, c, g, or t
  misc_feature (1145)..(1147): n is a, c, g, or t
  misc_feature (1158)..(1158): n is a, c, g, or t
  misc_feature (1163)..(1163): n is a, c, g, or t
  misc_feature (1165)..(1166): n is a, c, g, or t
  misc_feature (1170)..(1171): n is a, c, g, or t
  misc_feature (1177)..(1177): n is a, c, g, or t
  misc_feature (1179)..(1179): n is a, c, g, or t
  misc_feature (1184)..(1184): n is a, c, g, or t
  misc_feature (1187)..(1187): n is a, c, g, or t
  misc_feature (1200)..(1201): n is a, c, g, or t
  misc_feature (1203)..(1203): n is a, c, g, or t
  misc_feature (1208)..(1208): n is a, c, g, or t
  misc_feature (1226)..(1226): n is a, c, g, or t
  misc_feature (1228)..(1228): n is a, c, g, or t
  misc_feature (1236)..(1239): n is a, c, g, or t
  misc_feature (1242)..(1242): n is a, c, g, or t
  misc_feature (1246)..(1246): n is a, c, g, or t
  misc_feature (1249)..(1250): n is a, c, g, or t
  misc_feature (1252)..(1253): n is a, c, g, or t
  misc_feature (1255)..(1255): n is a, c, g, or t
  misc_feature (1257)..(1258): n is a, c, g, or t
  misc_feature (1265)..(1265): n is a, c, g, or t
  misc_feature (1274)..(1274): n is a, c, g, or t
  misc_feature (1278)..(1279): n is a, c, g, or t
  misc_feature (1283)..(1284): n is a, c, g, or t
  misc_feature (1287)..(1287): n is a, c, g, or t
  misc_feature (1294)..(1295): n is a, c, g, or t
  misc_feature (1298)..(1299): n is a, c, g, or t
  misc_feature (1302)..(1303): n is a, c, g, or t
  misc_feature (1307)..(1307): n is a, c, g, or t
  misc_feature (1309)..(1309): n is a, c, g, or t
  misc_feature (1315)..(1315): n is a, c, g, or t
  misc_feature (1323)..(1323): n is a, c, g, or t
  misc_feature (1328)..(1328): n is a, c, g, or t
  misc_feature (1333)..(1334): n is a, c, g, or t
  misc_feature (1341)..(1342): n is a, c, g, or t
  misc_feature (1344)..(1344): n is a, c, g, or t
  misc_feature (1348)..(1348): n is a, c, g, or t
  misc_feature (1354)..(1355): n is a, c, g, or t
  misc_feature (1361)..(1362): n is a, c, g, or t
  misc_feature (1368)..(1368): n is a, c, g, or t
  misc_feature (1377)..(1377): n is a, c, g, or t
  misc_feature (1382)..(1382): n is a, c, g, or t
  misc_feature (1387)..(1387): n is a, c, g, or t
  misc_feature (1393)..(1393): n is a, c, g, or t
  misc_feature (1401)..(1401): n is a, c, g, or t
  misc_feature (1403)..(1403): n is a, c, g, or t
  misc_feature (1410)..(1410): n is a, c, g, or t
  misc_feature (1414)..(1414): n is a, c, g, or t
tagagaaattactatgagaggatcgcatcaccatcaccatcacggatcctatttaggtgacactatagaatcgtcgacccacgcgtccgagagtgtgtctgcgggagaaagaggagaatcgcccaagcggcctcggaagtcccagggagtggaggcccccgccgtggagccgtgtggtgtatgtgtggtaacaccatgtctgtgcccctgctcaccgatgctgccaccgtgtctggagctgagcgggaaacggccgcggttatttttttacatggacttggagacacagggcacagctgggctgacgccctctccaccatccggctccctcacgtcaagtacatctgtccccatgcgcctaggatccctgtgaccctcaacatgaagatggtgatgccctcctggtttgacctgatggggctgagtccagatgccccagaggacgaggctggcatcaagaaggcagcagagaacatcaaggccttgattgagcatgaaatgaagaacgggatccctgccaatcgaatcgtcctgggaggcttttcacagggcggggccctgtccctctacacggccctcacctgcccccaccctctggctggcatcgtggcgttgagctgctggctgcctctgcaccgggccttcccccaggcagctaatggcagtgccaaggacctggccatactccagtgccatggggagctggaccccatggtgcccgtacggtttggggccctgacggctgaaaanctccngtctgttgtcacacctgccagggtccanttcagacatacccgggtgtcatgcacagctcctgtcctcangagatggcanctgtgaaggaattttcttgagaaanctgctgcctcctgtctnaactaattccccttggcccccannngcantnaccccanctcatggggaactcancaagcaagngtggcancntctttgaatctgaacccggtcgaaacccctggttcccnanccttnctgaacntntncttttncccaaaggcctttgggngcaagtgganaaggccntgncnggnctttccttnttgnccttaannnccttgnttttttntgnanannggaagnctgcttttttttnnntttcccttgaagngggccccctngtnaannntttggagaggnttatngnnactnnaaaaangncccanccnttaacctatcttnnangaacnctctctaacccccatttngncccccttnnnnacnaatnttnncnnangnncctccangccctcccncatnnattnnccnaaaaagnntcnngcnncctnantgtttnaaaaaaanaactnccccnnccttttnntngctntccccnnaaaatnnataagngaaatttgngggcnccccntctccncaagaggngncctcccncccnctttg

SEQ ID NO: 138 - DNA, 1195 bp, Homo Sapiens
  misc_feature (967)..(967): n is a, c, g, or t
  misc_feature (975)..(975): n is a, c, g, or t
  misc_feature (982)..(982): n is a, c, g, or t
  misc_feature (1002)..(1002): n is a, c, g, or t
  misc_feature (1010)..(1010): n is a, c, g, or t
  misc_feature (1024)..(1024): n is a, c, g, or t
  misc_feature (1032)..(1032): n is a, c, g, or t
  misc_feature (1059)..(1059): n is a, c, g, or t
  misc_feature (1070)..(1070): n is a, c, g, or t
  misc_feature (1075)..(1075): n is a, c, g, or t
  misc_feature (1082)..(1082): n is a, c, g, or t
  misc_feature (1102)..(1102): n is a, c, g, or t
  misc_feature (1105)..(1105): n is a, c, g, or t
  misc_feature (1112)..(1112): n is a, c, g, or t
  misc_feature (1121)..(1121): n is a, c, g, or t
  misc_feature (1132)..(1132): n is a, c, g, or t
  misc_feature (1139)..(1139): n is a, c, g, or t
  misc_feature (1142)..(1142): n is a, c, g, or t
  misc_feature (1149)..(1149): n is a, c, g, or t
  misc_feature (1151)..(1152): n is a, c, g, or t
  misc_feature (1162)..(1162): n is a, c, g, or t
  misc_feature (1164)..(1165): n is a, c, g, or t
  misc_feature (1168)..(1169): n is a, c, g, or t
  misc_feature (1176)..(1176): n is a, c, g, or t
  misc_feature (1178)..(1178): n is a, c, g, or t
  misc_feature (1184)..(1184): n is a, c, g, or t
  misc_feature (1189)..(1189): n is a, c, g, or t
  misc_feature (1191)..(1191): n is a, c, g, or t
gaatagagaaattactatgagaggatcgcatcaccatcaccatcacggatcctatttaggtgacactatagaatcgtcgacccacgcgtccgggggctcaggaccagctgcaaaccgacccaccgtgaaagtttgtggcacctgcaccatcagggcgacatgcactttggttctctgtgtttcaaaaaagacccagaggaattggagccacccaaagaaagcagagtcaaacgcaaggaagagaaagcagcaagccctgcagaggtgttggggggtcagtgctcaggcgtgggagttcgaagatcaccctcaagtacaggaaggagtggagtagtgtccgtcttctcctgggacagtcctgagagatgggcagcatccagttagatctggttccatggaacaccagctctccagacggtaggaataggaattacatgaaaagggctttgggagtcaggccagtttgggaaatgcagggttaaaccaaactcacaagttttcttgaggcaggttttcctggagctcctagataactcccaagcatcacactgtccacggacacgtgggccgcctcccaggctcttgtgagcccagcacctggtttttgcagtcttttgtttggctctcccacccccttacaccctttgggaactgctgagtcagatatacagaagaacagtcactgcgagggctgttaaactctcaggaaaggtaccaaagtgcatggcagcgtttggccccagtgagctggaaaacactttcgtctggtcttgagatgtttcctgcagcacaagaggttggcagagcaacctcagaacctcttctgtctctgtttatgcttttgttcagaagcttagtaccaggaattaatctcagctccttcccagaggattttaggcacacagggatcttttattctgcacttctccagtgatgctttcaacacaattgtatcaaaacagcctangctattcncttacangccctgcttttgccctgggnaatcttancacctcatttttantaagtacncttgcaaatccgaaaaggcaggtggangtaaaatccantgtcntctgcantggggggcctgccctggccntcnccaaaanggggctctncgaaatgggancccctgnagntttttantnncccaaaaaanannganngggtttnanaaatgnccctntngccc

SEQ ID NO: 139 - DNA, 1200 bp, Homo Sapiens
  misc_feature (69)..(69): n is a, c, g, or t
  misc_feature (847)..(847): n is a, c, g, or t
  misc_feature (898)..(898): n is a, c, g, or t
  misc_feature (903)..(903): n is a, c, g, or t
  misc_feature (910)..(910): n is a, c, g, or t
  misc_feature (934)..(934): n is a, c, g, or t
  misc_feature (939)..(939): n is a, c, g, or t
  misc_feature (945)..(945): n is a, c, g, or t
  misc_feature (955)..(955): n is a, c, g, or t
  misc_feature (968)..(968): n is a, c, g, or t
  misc_feature (973)..(973): n is a, c, g, or t
  misc_feature (979)..(979): n is a, c, g, or t
  misc_feature (989)..(989): n is a, c, g, or t
  misc_feature (999)..(999): n is a, c, g, or t
  misc_feature (1004)..(1004): n is a, c, g, or t
  misc_feature (1006)..(1006): n is a, c, g, or t
  misc_feature (1019)..(1020): n is a, c, g, or t
  misc_feature (1023)..(1023): n is a, c, g, or t
  misc_feature (1026)..(1026): n is a, c, g, or t
  misc_feature (1028)..(1028): n is a, c, g, or t
  misc_feature (1030)..(1030): n is a, c, g, or t
  misc_feature (1051)..(1051): n is a, c, g, or t
  misc_feature (1059)..(1059): n is a, c, g, or t
  misc_feature (1065)..(1065): n is a, c, g, or t
  misc_feature (1068)..(1069): n is a, c, g, or t
  misc_feature (1071)..(1071): n is a, c, g, or t
  misc_feature (1073)..(1074): n is a, c, g, or t
  misc_feature (1076)..(1076): n is a, c, g, or t
  misc_feature (1084)..(1084): n is a, c, g, or t
  misc_feature (1090)..(1090): n is a, c, g, or t
  misc_feature (1099)..(1099): n is a, c, g, or t
  misc_feature (1101)..(1101): n is a, c, g, or t
  misc_feature (1105)..(1105): n is a, c, g, or t
  misc_feature (1119)..(1119): n is a, c, g, or t
  misc_feature (1128)..(1128): n is a, c, g, or t
  misc_feature (1131)..(1132): n is a, c, g, or t
  misc_feature (1138)..(1138): n is a, c, g, or t
  misc_feature (1143)..(1143): n is a, c, g, or t
  misc_feature (1146)..(1146): n is a, c, g, or t
  misc_feature (1150)..(1150): n is a, c, g, or t
  misc_feature (1152)..(1155): n is a, c, g, or t
  misc_feature (1159)..(1159): n is a, c, g, or t
  misc_feature (1163)..(1164): n is a, c, g, or t
  misc_feature (1167)..(1167): n is a, c, g, or t
  misc_feature (1172)..(1173): n is a, c, g, or t
  misc_feature (1179)..(1179): n is a, c, g, or t
  misc_feature (1188)..(1188): n is a, c, g, or t
  misc_feature (1190)..(1190): n is a, c, g, or t
  misc_feature (1193)..(1193): n is a, c, g, or t
  misc_feature (1196)..(1196): n is a, c, g, or t
  misc_feature (1200)..(1200): n is a, c, g, or t
ttagagaaattactatgagaggatcgcatcaccatcaccatcacggatcctatttaggtgacactatantaatcgtcgacccacgcgtccggcccgagcggagcgccgcacgttcccaaccgcgaggccagacatctgactgttggtgtgagaccagtgctcctggtggtgtgccctgagccatggaggcgcctttgcagacagagatggtggagctggtgcccaatggcaaacactcagaggggctgctcccggtcatcacccccatggcaggcaaccagagggtcgaggaccctgcacggagctgtatggagggcaagagcttcctacagaaaagtcccagcaaggagccacacttcactgacttcgaggggaagacatcattcgggatgtcagtgttcaacctcagcaatgccatcatgggcagcggcatcctgggactcgcctatgccatggccaatacgggcattatccttttcctgttcctgttgacagctgtcgccttgctctccagctactccatccacctgctactcaagtcctcaggggtcgtgggcatccgtgcctatgagcagctgggctaccgtgcctttgggaccccaggaaagctggcagcagccctggccatcacgctccagaacatcggagccatgtccagctacctgtacatcatcaagtctgagctgccacttgtcatacagaccttcctgaacctggaggagaaaacctcggactggtacatgaacgggaactacctggtaatccttgtctctgtcaccatcattctgcccctggcactgatgcggcagcttggctacctgggctactccagcggcttctctcttanctgcatggtgttcttcctaattgcagtcatctacaaaaaagttccacgtgncctgnccactgncccccaacttcaaaaacaccacanggaantttcancccacgtggnaaatcgtgaaagnaaaangtgcanctgcaggtcnagcctgaggnttcancnttttgcatcccanntanttnangntcaattcaaaaaagcataacnatcccatnatggcnttnncntnntntgcacccnaggggngcccatttnantgantcaaggaccccccnaaaaaaaanggnnaaattnccaancgnccancnnnncagnaaannagnaattnngggggnccctttggnanctnacntttn

SEQ ID NO: 140 - DNA, 256 bp, Homo Sapiens
  misc_feature (2)..(5): n is a, c, g, or t
  misc_feature (16)..(16): n is a, c, g, or t
  misc_feature (21)..(23): n is a, c, g, or t
  misc_feature (25)..(26): n is a, c, g, or t
  misc_feature (33)..(33): n is a, c, g, or t
  misc_feature (37)..(37): n is a, c, g, or t
  misc_feature (40)..(41): n is a, c, g, or t
  misc_feature (45)..(45): n is a, c, g, or t
  misc_feature (49)..(50): n is a, c, g, or t
  misc_feature (57)..(57): n is a, c, g, or t
  misc_feature (59)..(59): n is a, c, g, or t
  misc_feature (63)..(64): n is a, c, g, or t
  misc_feature (67)..(67): n is a, c, g, or t
  misc_feature (72)..(75): n is a, c, g, or t
  misc_feature (77)..(81): n is a, c, g, or t
  misc_feature (83)..(84): n is a, c, g, or t
  misc_feature (86)..(86): n is a, c, g, or t
  misc_feature (90)..(90): n is a, c, g, or t
  misc_feature (93)..(96): n is a, c, g, or t
  misc_feature (101)..(101): n is a, c, g, or t
  misc_feature (105)..(105): n is a, c, g, or t
  misc_feature (116)..(118): n is a, c, g, or t
  misc_feature (121)..(125): n is a, c, g, or t
  misc_feature (128)..(128): n is a, c, g, or t
  misc_feature (131)..(131): n is a, c, g, or t
  misc_feature (136)..(136): n is a, c, g, or t
  misc_feature (140)..(140): n is a, c, g, or t
  misc_feature (142)..(142): n is a, c, g, or t
  misc_feature (152)..(152): n is a, c, g, or t
  misc_feature (157)..(158): n is a, c, g, or t
  misc_feature (166)..(166): n is a, c, g, or t
  misc_feature (168)..(170): n is a, c, g, or t
  misc_feature (173)..(175): n is a, c, g, or t
  misc_feature (177)..(178): n is a, c, g, or t
  misc_feature (180)..(181): n is a, c, g, or t
  misc_feature (183)..(183): n is a, c, g, or t
  misc_feature (185)..(188): n is a, c, g, or t
  misc_feature (190)..(190): n is a, c, g, or t
  misc_feature (192)..(192): n is a, c, g, or t
  misc_feature (195)..(197): n is a, c, g, or t
  misc_feature (199)..(199): n is a, c, g, or t
  misc_feature (208)..(209): n is a, c, g, or t
  misc_feature (211)..(212): n is a, c, g, or t
  misc_feature (216)..(217): n is a, c, g, or t
  misc_feature (225)..(225): n is a, c, g, or t
  misc_feature (229)..(233): n is a, c, g, or t
  misc_feature (236)..(237): n is a, c, g, or t
  misc_feature (241)..(241): n is a, c, g, or t
  misc_feature (247)..(247): n is a, c, g, or t
  misc_feature (249)..(249): n is a, c, g, or t
cnnnnccatgcgcccnccgcnnncnnccccaancccnacnntgcncccnnccccccncncccnnccntctcnnnnannnnncnncntcanctnnnntttantttnactttttactnnnaannnnnatntancatanaaantnttttaatttntttannattaattntnnnttnnnanncnntntnnnntnangannnantcaccacanncnnattnnactcaaantccnnnnncanncccnggtcancntcccccc

SEQ ID NO: 141 - DNA, 256 bp, Homo Sapiens
  misc_feature (2)..(2): n is a, c, g, or t
  misc_feature (52)..(52): n is a, c, g, or t
  misc_feature (226)..(226): n is a, c, g, or t
cnctgacgaggatcgcatcaccatcaccatcacggatcctatttaggtgacnctatagaatcgtcgacccacgcgtccgagaccaacttcattgacatggagaacatgtttgacttgctgaaagaggagacagaagtgaaggaccttcctggagcagggccccttcgctttcagaagggccgtattgagtttgagaacgtgcacttcagctatgccgatgggcggnagactctgcaggacgtgtctttcactgtga

SEQ ID NO: 142 - DNA, 1200 bp, Homo Sapiens
  misc_feature (965)..(965): n is a, c, g, or t
  misc_feature (977)..(977): n is a, c, g, or t
  misc_feature (985)..(985): n is a, c, g, or t
  misc_feature (990)..(990): n is a, c, g, or t
  misc_feature (992)..(992): n is a, c, g, or t
  misc_feature (1003)..(1003): n is a, c, g, or t
  misc_feature (1065)..(1065): n is a, c, g, or t
  misc_feature (1069)..(1069): n is a, c, g, or t
  misc_feature (1073)..(1073): n is a, c, g, or t
  misc_feature (1091)..(1091): n is a, c, g, or t
  misc_feature (1102)..(1102): n is a, c, g, or t
  misc_feature (1133)..(1133): n is a, c, g, or t
  misc_feature (1139)..(1140): n is a, c, g, or t
  misc_feature (1142)..(1142): n is a, c, g, or t
  misc_feature (1147)..(1147): n is a, c, g, or t
  misc_feature (1169)..(1169): n is a, c, g, or t
tagagagattactatgagaggatcgcatcaccatcaccatcacggatcctatttaggtgacactatagaatcgtcgacccacgcgtccggtgaaggtaatcatcctgcattagctgtggaagacttgggatgtggggtgatacaggtagatgaagataattgtaaggaagaaaaggcacaagtggcaaacaggcctttaaaatgcattgttgaggaaacctatatcgacttgaccacagaatctcccagttcatgtgaagtaaaaaaagatgagttaaaatcagagccaggatcaaattgtgataactcggagttgcctgggactttgcataattctcacaaaaagagaagaaacatttctgatctaaatcatcctcataaaaaacaaagaaaggaaacagacttaactaataaggaaaagaccaagaaacctacccaagattcttgtgagaatactgaagctcaccaaaagaaagccagtaagaagaaggcccctcctgtgactaaagatccctcatcattaaaggcaaccccagggattaaggattcatcagcagcacttgccacttctacaagtctttctgcaaaaaatgttattaaaaagaagggagaaattatcattttatggacaagaaatgatgaccgggaaattttattggagtgtcagaaaagagggccatcatttaaaacatttgcatatttagccgccaagttggataaaaatccaaatcaggtctcagaaagattccagcagctaatgaagctctttgaaaagtcaaaatgcaggtagttaatggttacactacaggagactagtaaaataaatgtttgacactgtagttgtgcagttaatggcctgttagtcattgaagatgtgaatagtgggtgagagacatccagttgagttcctgcttcagtcacaggttggaggatgattgctcgagcaggcatctaaggtgacctcntccccagggacntgctcaantgaancntgctgcagttncaatcaccatggcatctctccccaccttctgattgctgaagagcctagggggggggaatccntttngatnaaaaaaaagttttttaanaaaaatcaaanttcttgaaaaacaaaatggggtttctaaccngggaanncnggganggagggaatttaaggttccccnatttttattagggccaattaaaaacaaaact

SEQ ID NO: 143 - DNA, 1200 bp, Homo Sapiens
  misc_feature (1)..(1): n is a, c, g, or t
  misc_feature (6)..(7): n is a, c, g, or t
  misc_feature (731)..(731): n is a, c, g, or t
  misc_feature (781)..(781): n is a, c, g, or t
  misc_feature (798)..(798): n is a, c, g, or t
  misc_feature (835)..(835): n is a, c, g, or t
  misc_feature (856)..(856): n is a, c, g, or t
  misc_feature (866)..(867): n is a, c, g, or t
  misc_feature (885)..(885): n is a, c, g, or t
  misc_feature (903)..(903): n is a, c, g, or t
  misc_feature (922)..(922): n is a, c, g, or t
  misc_feature (933)..(933): n is a, c, g, or t
  misc_feature (941)..(941): n is a, c, g, or t
  misc_feature (954)..(954): n is a, c, g, or t
  misc_feature (969)..(969): n is a, c, g, or t
  misc_feature (972)..(973): n is a, c, g, or t
  misc_feature (978)..(978): n is a, c, g, or t
  misc_feature (980)..(980): n is a, c, g, or t
  misc_feature (987)..(987): n is a, c, g, or t
  misc_feature (989)..(989): n is a, c, g, or t
  misc_feature (995)..(995): n is a, c, g, or t
  misc_feature (998)..(998): n is a, c, g, or t
  misc_feature (1001)..(1001): n is a, c, g, or t
  misc_feature (1009)..(1009): n is a, c, g, or t
  misc_feature (1033)..(1033): n is a, c, g, or t
  misc_feature (1035)..(1035): n is a, c, g, or t
  misc_feature (1048)..(1049): n is a, c, g, or t
  misc_feature (1053)..(1053): n is a, c, g, or t
  misc_feature (1062)..(1062): n is a, c, g, or t
  misc_feature (1066)..(1066): n is a, c, g, or t
  misc_feature (1068)..(1070): n is a, c, g, or t
  misc_feature (1073)..(1074): n is a, c, g, or t
  misc_feature (1076)..(1076): n is a, c, g, or t
  misc_feature (1079)..(1079): n is a, c, g, or t
  misc_feature (1081)..(1082): n is a, c, g, or t
  misc_feature (1088)..(1088): n is a, c, g, or t
  misc_feature (1091)..(1091): n is a, c, g, or t
  misc_feature (1095)..(1096): n is a, c, g, or t
  misc_feature (1098)..(1098): n is a, c, g, or t
  misc_feature (1100)..(1102): n is a, c, g, or t
  misc_feature (1104)..(1105): n is a, c, g, or t
  misc_feature (1107)..(1110): n is a, c, g, or t
  misc_feature (1112)..(1112): n is a, c, g, or t
  misc_feature (1129)..(1129): n is a, c, g, or t
  misc_feature (1133)..(1133): n is a, c, g, or t
  misc_feature (1138)..(1139): n is a, c, g, or t
  misc_feature (1144)..(1146): n is a, c, g, or t
  misc_feature (1148)..(1148): n is a, c, g, or t
  misc_feature (1151)..(1151): n is a, c, g, or t
  misc_feature (1157)..(1157): n is a, c, g, or t
  misc_feature (1165)..(1165): n is a, c, g, or t
  misc_feature (1168)..(1168): n is a, c, g, or t
  misc_feature (1173)..(1173): n is a, c, g, or t
  misc_feature (1181)..(1181): n is a, c, g, or t
  misc_feature (1185)..(1186): n is a, c, g, or t
  misc_feature (1190)..(1190): n is a, c, g, or t
naaatnngaggaaattactatgagaggatcgcatcaccatcaccatcacgggatcctatttaggtgacactatagaatcgtcgacccacgcgtccgggttagtttctgcgacttgtgttgggactgctgataggaagatgtcttcaggaaatgctaaaattgggcaccctgcccccaacttcaaagccacagctgttatgccagatggtcagtttaaagatatcagcctgtctgactacaaaggaaaatatgttgtgttcttcttttaccctcttgacttcacctttgtgtgccccacggagatcattgctttcagtgatagggcagaagaatttaagaaactcaactgccaagtgattggtgcttctgtggattctcacttctgtcatctagcatgggtcaatacacctaagaaacaaggaggactgggacccatgaacattcctttggtatcagacccgaagcgcaccattgctcaggattatggggtcttaaaggctgatgaaggcatctcgttcaggggcctttttatcattgatgataagggtattcttcggcagatcactgtaaatgacctccctgttggccgctctgtggatgagactttgagactagttcaggccttccagttcactgacaaacatggggaagtgtgcccagctggctggaaacctggcagtgataccatcaagcctgatgtccaaaagagcaaagaatatttctccaagcanaagtgagcgctgggctgttttagtgccaggctgcggtgggcagccatganaacaaaacctcttctgnatttttttttttccattagtaaaacacaagacttcanattcagccgaattgtggtgtnttacaaaggnnagggccttttccctacangggggtggaaaagaccanccctttctttccttttggnaaggaaaaggncctggaantttggccgtttgnggggcaaggcctacnggnntttgnantgaatgncnttaagnaanganccaacccntttaatccttttggaagttttggnanaaaaactttgganncggnaaaaaaaanaaanannncannanaanannggtaanaanaaannanannnannannnnanggggggggggccccccncccnaaaannggggnnncnaanaaaacnttaatttnacntaaancctggccncccnnttgnaaaaattccc

SEQ ID NO: 144 - DNA, 1200 bp, Homo Sapiens
  misc_feature (935)..(935): n is a, c, g, or t
  misc_feature (945)..(945): n is a, c, g, or t
  misc_feature (956)..(956): n is a, c, g, or t
  misc_feature (968)..(968): n is a, c, g, or t
  misc_feature (972)..(973): n is a, c, g, or t
  misc_feature (997)..(997): n is a, c, g, or t
  misc_feature (999)..(999): n is a, c, g, or t
  misc_feature (1008)..(1008): n is a, c, g, or t
  misc_feature (1016)..(1016): n is a, c, g, or t
  misc_feature (1018)..(1018): n is a, c, g, or t
  misc_feature (1028)..(1028): n is a, c, g, or t
  misc_feature (1050)..(1050): n is a, c, g, or t
  misc_feature (1053)..(1053): n is a, c, g, or t
  misc_feature (1068)..(1068): n is a, c, g, or t
  misc_feature (1088)..(1088): n is a, c, g, or t
  misc_feature (1100)..(1100): n is a, c, g, or t
  misc_feature (1105)..(1105): n is a, c, g, or t
  misc_feature (1109)..(1109): n is a, c, g, or t
  misc_feature (1118)..(1119): n is a, c, g, or t
  misc_feature (1132)..(1132): n is a, c, g, or t
  misc_feature (1139)..(1139): n is a, c, g, or t
  misc_feature (1144)..(1144): n is a, c, g, or t
  misc_feature (1148)..(1148): n is a, c, g, or t
  misc_feature (1153)..(1153): n is a, c, g, or t
  misc_feature (1165)..(1168): n is a, c, g, or t
  misc_feature (1173)..(1173): n is a, c, g, or t
  misc_feature (1177)..(1178): n is a, c, g, or t
  misc_feature (1181)..(1183): n is a, c, g, or t
  misc_feature (1193)..(1194): n is a, c, g, or t
  misc_feature (1199)..(1199): n is a, c, g, or t
tagagaaattactatgagaggatcgcatcaccatcaccatcacggatcctatttaggtgacactatagaatcgtcgacccacgcgtccggcccgcccgcgcccgtccgcagccgcccgccagacgcgcccagtatgagggagatcgtgcacatccaggccggccagtgcggcaaccagatcggggccaagttctgggaagtcatcagtgatgagcatggcatcgaccccagcggcaactacgtgggcgactcggacttgcagctggagcggatcagcgtctactacaacgaggcctcttctcacaagtacgtgcctcgagccattctggtggacctggaacccggaaccatggacagtgtccgctcaggggcctttggacatctcttcaggcctgacaatttcatctttggtcagagtggggccggcaacaactgggccaagggtcactacacggagggggcggagctggtggattcggtcctggatgtggtgcggaaggagtgtgaaaactgcgactgcctgcagggcttccagctgacccactcgctggggggcggcacgggctccggcatgggcacgttgctcatcagcaaggtgcgtgaggagtatcccgaccgcatcatgaacaccttcagcgtcgtgccctcacccaaggtgtcagacacggtggtggagccctacaacgccacgctgtccatccaccagctggtggagaacacggatgagacctactgcatcgacaacgaggcgctctacgacatctgcttccgcaccctcaagctggccacgcccacctacggggacctcaaccacctggtatcggccaccatgagcggagtcaccacctccttgcgcttcccgggccagctcaacgctgacctgcgcaagctggccgtcaacatggtgcccttcccgcgcctgcacttcttcatgnccgggcttcnccccccctcanagcccggggcanccannaataccgggccctgaccgtgcccnanctcacccancaaatgtncnatgtcaaaanatgatggccgcctgcaacccgngcnaggccgctaactganggggccaccgtgttccgggncccatgtccttnaagangtgnaaaaaaaannctggcctccaaanaaaaaanactanttcnggaanggatccccaaannnnaaggngccnnggnnnaatccccccnngcctna

SEQ ID NO: 145 - DNA, 256 bp, Homo Sapiens
cggcggcacccgtggcagccctggcggacgcaggagcgatggcagcgaccgatatagctcgccaggtgggtgaaggttgccgaactgtccccctggctggacatgtggggtttgacagcttgcctgaccagctggtgaataagtccgtcagccagggcttctgcttcaacatcctgtgcgtgggagagacaggtttgggcaagtccaccctcatggacaccctgttcaacaccaaattcgaaggggagccagccac

SEQ ID NO: 146 - DNA, 1200 bp, Homo Sapiens
  misc_feature (647)..(647): n is a, c, g, or t
  misc_feature (656)..(658): n is a, c, g, or t
  misc_feature (663)..(663): n is a, c, g, or t
  misc_feature (667)..(667): n is a, c, g, or t
  misc_feature (671)..(672): n is a, c, g, or t
  misc_feature (675)..(675): n is a, c, g, or t
  misc_feature (677)..(680): n is a, c, g, or t
  misc_feature (690)..(690): n is a, c, g, or t
  misc_feature (692)..(692): n is a, c, g, or t
  misc_feature (747)..(747): n is a, c, g, or t
  misc_feature (772)..(772): n is a, c, g, or t
  misc_feature (787)..(787): n is a, c, g, or t
  misc_feature (864)..(864): n is a, c, g, or t
  misc_feature (895)..(895): n is a, c, g, or t
  misc_feature (898)..(898): n is a, c, g, or t
  misc_feature (930)..(930): n is a, c, g, or t
  misc_feature (932)..(932): n is a, c, g, or t
  misc_feature (941)..(941): n is a, c, g, or t
  misc_feature (945)..(945): n is a, c, g, or t
  misc_feature (949)..(949): n is a, c, g, or t
  misc_feature (952)..(952): n is a, c, g, or t
  misc_feature (955)..(955): n is a, c, g, or t
  misc_feature (960)..(960): n is a, c, g, or t
  misc_feature (972)..(972): n is a, c, g, or t
  misc_feature (980)..(980): n is a, c, g, or t
  misc_feature (988)..(988): n is a, c, g, or t
  misc_feature (1000)..(1000): n is a, c, g, or t
  misc_feature (1002)..(1002): n is a, c, g, or t
  misc_feature (1006)..(1006): n is a, c, g, or t
  misc_feature (1021)..(1021): n is a, c, g, or t
  misc_feature (1031)..(1031): n is a, c, g, or t
  misc_feature (1042)..(1042): n is a, c, g, or t
  misc_feature (1045)..(1046): n is a, c, g, or t
  misc_feature (1059)..(1059): n is a, c, g, or t
  misc_feature (1066)..(1066): n is a, c, g, or t
  misc_feature (1071)..(1071): n is a, c, g, or t
  misc_feature (1077)..(1077): n is a, c, g, or t
  misc_feature (1081)..(1081): n is a, c, g, or t
  misc_feature (1111)..(1111): n is a, c, g, or t
  misc_feature (1117)..(1117): n is a, c, g, or t
  misc_feature (1125)..(1125): n is a, c, g, or t
  misc_feature (1131)..(1131): n is a, c, g, or t
  misc_feature (1134)..(1134): n is a, c, g, or t
  misc_feature (1141)..(1141): n is a, c, g, or t
  misc_feature (1163)..(1163): n is a, c, g, or t
  misc_feature (1169)..(1169): n is a, c, g, or t
  misc_feature (1171)..(1171): n is a, c, g, or t
  misc_feature (1175)..(1175): n is a, c, g, or t
  misc_feature (1190)..(1190): n is a, c, g, or t
  misc_feature (1193)..(1194): n is a, c, g, or t
  misc_feature (1197)..(1197): n is a, c, g, or t
tagagaaattactatgagaggatcgcatcaccatcaccatcacggatcctatttaggtgacactatagaatcgtcgacccacgcgtccggtgaaaagaaggcacggaaggctatgtccaaactgggtcttcggcaggttacaggagttactagagtcactatccggaaatctaagaatatcctctttgtcatcacaaaaccagatgtctacaagagccctgcttcagatacttacatagtttttggggaagccaagatcgaagatttatcccagcaagcacaactagcagctgctgagaaattcaaagttcaaggtgaagctgtctcaaacattcaagaaaacacacagactccaactgtacaagaggagagtgaagaggaagaggtcgatgaaacaggtgtagaagttaaggacatagaattggtcatgtcacaagcaaatgtgtcgagagcaaaggcagtccgagccctgaagaacaacagtaatgatattgtaaatgcgattatggaattaacaatgtaaccatatggaagcaactttttttggtgtctcaaaggagtaactgcagcttggtttgaaatttgtactgtttctatcataaataaagttatggcttcttgttggatgaaaaaaaaaaaaaaaaaanaaaaaaaannnaaaanaaanaaannaanannnnggggcggccncnccctatagtgagtcgtattaagcttaattagctgagcttggactcctgttgatanatccagtaatgacctcagaactccntctggatttgttcanaacgctcggttgccgccgggcgttttttattggtgagaatcccagctagcttggcgagattttcaggagctaaggangctaaaatggaaaaaaaaatccctggatatnccnccgttgaaatatcccaatggcatcgtaaaaancntttgaggcnttcngtcngtngcncatgnacctataaccanaccgtccnctggattnacggcctttttnangacngtaaaaaaaaataancccagttttntccggcctttntcnnattcttgcccccntgagaangcccnccgganttcntatggcatgaaaacggggacctggggaatnggaaanggtccccnttttanccntttcccngacaactgaacgtttccccccngggggnanaccncacaattcggggttnccnnatnttc

SEQ ID NO: 147 - DNA, 1207 bp, Homo Sapiens
  misc_feature (1)..(1): n is a, c, g, or t
  misc_feature (824)..(824): n is a, c, g, or t
  misc_feature (911)..(911): n is a, c, g, or t
  misc_feature (940)..(940): n is a, c, g, or t
  misc_feature (942)..(942): n is a, c, g, or t
  misc_feature (967)..(967): n is a, c, g, or t
  misc_feature (974)..(974): n is a, c, g, or t
  misc_feature (978)..(978): n is a, c, g, or t
  misc_feature (988)..(988): n is a, c, g, or t
  misc_feature (1011)..(1011): n is a, c, g, or t
  misc_feature (1033)..(1033): n is a, c, g, or t
  misc_feature (1036)..(1036): n is a, c, g, or t
  misc_feature (1045)..(1045): n is a, c, g, or t
  misc_feature (1047)..(1047): n is a, c, g, or t
  misc_feature (1052)..(1052): n is a, c, g, or t
  misc_feature (1056)..(1056): n is a, c, g, or t
  misc_feature (1071)..(1071): n is a, c, g, or t
  misc_feature (1075)..(1075): n is a, c, g, or t
  misc_feature (1081)..(1082): n is a, c, g, or t
  misc_feature (1101)..(1101): n is a, c, g, or t
  misc_feature (1111)..(1112): n is a, c, g, or t
  misc_feature (1117)..(1117): n is a, c, g, or t
  misc_feature (1119)..(1119): n is a, c, g, or t
  misc_feature (1121)..(1121): n is a, c, g, or t
  misc_feature (1129)..(1130): n is a, c, g, or t
  misc_feature (1137)..(1138): n is a, c, g, or t
  misc_feature (1140)..(1140): n is a, c, g, or t
  misc_feature (1145)..(1145): n is a, c, g, or t
  misc_feature (1153)..(1154): n is a, c, g, or t
  misc_feature (1158)..(1158): n is a, c, g, or t
  misc_feature (1168)..(1168): n is a, c, g, or t
  misc_feature (1170)..(1170): n is a, c, g, or t
  misc_feature (1176)..(1177): n is a, c, g, or t
  misc_feature (1182)..(1182): n is a, c, g, or t
  misc_feature (1189)..(1189): n is a, c, g, or t
  misc_feature (1191)..(1191): n is a, c, g, or t
  misc_feature (1195)..(1196): n is a, c, g, or t
  misc_feature (1200)..(1201): n is a, c, g, or t
  misc_feature (1207)..(1207): n is a, c, g, or t
naattagagaaattactatgagaggatcgcatcaccatcaccatcacggatcctatttaggtgacactatagaatcgtcgacccacgcgtccggtgggaggggaggagtggagatggcggcggcggcggctcaggggggcgggggcggggagccccgtagaaccgagggggtcggcccgggggtcccgggggaggtggagatggtgaaggggcagccgttcgacgtgggcccgcgctacacgcagttgcagtacatcggcgagggcgcgtacggcatggtcagctcggcctatgaccacgtgcgcaagactcgcgtggccatcaagaagatcagccccttcgaacatcagacctactgccagcgcacgctccgggagatccagatcctgctgcgcttccgccatgagaatgtcatcggcatccgagacattctgcgggcgtccaccctggaagccatgagagatgtctacattgtgcaggacctgatggagactgacctgtacaagttgctgaaaagccagcagctgagcaatgaccatatctgctacttcctctaccagatcctgcggggcctcaagtacatccactccgccaacgtgctccaccgagatctaaagccctccaacctgctcatcaacaccacctgcgaccttaagatttgtgatttcggcctggcccggattgccgatcctgagcatgaccacaccggcttcctgacggagtatgtggctacgcgctggtaccgggccccagagatcatgctgaactccaagggctataccaagtccatcgacatctggtctgtgggctgcattctggctganatgctctctaaccggcccatcttcctggcaagcactacctggatcagctcaaccacattctgggcatcctgggctccccatcccagnaggacctgaattgtatcatcaacatgaangnccgaaactacctacagtctctgccntccaaancaangtggctgggnccaagcttttccccaagtcaaantccaaagcctttgacctgctgnacngaattttancntttancccnataaacgaatccagnggangaaagnncttggttccccctacttgnaacaatattnnacccnangnataacccnnggcccannanccttnccttcccnnggantggagacctncnaaggannggttnaggattntntccnnaaanncccctn

SEQ ID NO: 148 - DNA, 1426 bp, Homo Sapiens
  misc_feature (900)..(900): n is a, c, g, or t
  misc_feature (917)..(917): n is a, c, g, or t
  misc_feature (920)..(920): n is a, c, g, or t
  misc_feature (925)..(925): n is a, c, g, or t
  misc_feature (940)..(940): n is a, c, g, or t
  misc_feature (946)..(946): n is a, c, g, or t
  misc_feature (950)..(950): n is a, c, g, or t
  misc_feature (957)..(957): n is a, c, g, or t
  misc_feature (965)..(965): n is a, c, g, or t
  misc_feature (984)..(984): n is a, c, g, or t
  misc_feature (990)..(990): n is a, c, g, or t
  misc_feature (998)..(998): n is a, c, g, or t
  misc_feature (1005)..(1005): n is a, c, g, or t
  misc_feature (1021)..(1021): n is a, c, g, or t
  misc_feature (1023)..(1023): n is a, c, g, or t
  misc_feature (1042)..(1042): n is a, c, g, or t
  misc_feature (1047)..(1048): n is a, c, g, or t
  misc_feature (1052)..(1054): n is a, c, g, or t
  misc_feature (1061)..(1061): n is a, c, g, or t
  misc_feature (1066)..(1066): n is a, c, g, or t
  misc_feature (1072)..(1072): n is a, c, g, or t
  misc_feature (1076)..(1076): n is a, c, g, or t
  misc_feature (1078)..(1078): n is a, c, g, or t
  misc_feature (1091)..(1091): n is a, c, g, or t
  misc_feature (1093)..(1093): n is a, c, g, or t
  misc_feature (1097)..(1098): n is a, c, g, or t
  misc_feature (1100)..(1100): n is a, c, g, or t
  misc_feature (1103)..(1104): n is a, c, g, or t
  misc_feature (1116)..(1117): n is a, c, g, or t
  misc_feature (1126)..(1126): n is a, c, g, or t
  misc_feature (1128)..(1128): n is a, c, g, or t
  misc_feature (1130)..(1130): n is a, c, g, or t
  misc_feature (1136)..(1136): n is a, c, g, or t
  misc_feature (1145)..(1145): n is a, c, g, or t
  misc_feature (1151)..(1151): n is a, c, g, or t
  misc_feature (1153)..(1153): n is a, c, g, or t
  misc_feature (1160)..(1160): n is a, c, g, or t
  misc_feature (1168)..(1170): n is a, c, g, or t
  misc_feature (1178)..(1178): n is a, c, g, or t
  misc_feature (1189)..(1189): n is a, c, g, or t
  misc_feature (1192)..(1194): n is a, c, g, or t
  misc_feature (1198)..(1198): n is a, c, g, or t
  misc_feature (1202)..(1202): n is a, c, g, or t
  misc_feature (1209)..(1209): n is a, c, g, or t
  misc_feature (1215)..(1215): n is a, c, g, or t
  misc_feature (1218)..(1218): n is a, c, g, or t
  misc_feature (1220)..(1220): n is a, c, g, or t
  misc_feature (1223)..(1224): n is a, c, g, or t
  misc_feature (1228)..(1228): n is a, c, g, or t
  misc_feature (1234)..(1235): n is a, c, g, or t
  misc_feature (1251)..(1251): n is a, c, g, or t
  misc_feature (1256)..(1256): n is a, c, g, or t
  misc_feature (1258)..(1258): n is a, c, g, or t
  misc_feature (1265)..(1265): n is a, c, g, or t
  misc_feature (1268)..(1268): n is a, c, g, or t
  misc_feature (1272)..(1273): n is a, c, g, or t
  misc_feature (1275)..(1275): n is a, c, g, or t
  misc_feature (1279)..(1280): n is a, c, g, or t
  misc_feature (1285)..(1285): n is a, c, g, or t
  misc_feature (1288)..(1288): n is a, c, g, or t
  misc_feature (1301)..(1301): n is a, c, g, or t
  misc_feature (1323)..(1323): n is a, c, g, or t
  misc_feature (1326)..(1326): n is a, c, g, or t
  misc_feature (1328)..(1329): n is a, c, g, or t
  misc_feature (1340)..(1340): n is a, c, g, or t
  misc_feature (1342)..(1342): n is a, c, g, or t
  misc_feature (1345)..(1345): n is a, c, g, or t
  misc_feature (1347)..(1348): n is a, c, g, or t
  misc_feature (1350)..(1351): n is a, c, g, or t
  misc_feature (1353)..(1353): n is a, c, g, or t
  misc_feature (1356)..(1356): n is a, c, g, or t
  misc_feature (1358)..(1358): n is a, c, g, or t
  misc_feature (1363)..(1364): n is a, c, g, or t
  misc_feature (1366)..(1368): n is a, c, g, or t
  misc_feature (1370)..(1370): n is a, c, g, or t
  misc_feature (1385)..(1385): n is a, c, g, or t
  misc_feature (1390)..(1390): n is a, c, g, or t
  misc_feature (1395)..(1396): n is a, c, g, or t
  misc_feature (1400)..(1401): n is a, c, g, or t
  misc_feature (1406)..(1406): n is a, c, g, or t
  misc_feature (1410)..(1410): n is a, c, g, or t
caatagagagattactatgagaggatcgcatcaccatcaccatcacggatcctatttaggtgacactatagaatcgtcgacccacgcgtccgaaggtgacatcctgcattcacaatgtcctgagtggtcagcgctggatcgagcactatggggaggtgctcatccgaaacacacaggacagctcctgccactgcaagatcaccttctgcaaggccaagtactggagttccaatgtccacgaggtgcagggcgctgtgctcagtcggagtggccgtgtcctccaccgactctttgggaagtggcacgaggggctgtaccggggacccacgccaggtggccagtgcatctggaaacccaactcaatgccccccgaccatgagcgaaacttcggcttcacccagtttgccttggagctgaatgagctgacagcagagctgaaacggtcgctgccttccaccgacacgagactccggccagaccagaggtacctggaggaggggaacatacaggccgctgaggcccagaagagaaggatcgagcagctgcagcgagacaggcgcaaagtcatggaggaaaacaacatcgtacaccaggctcgcttcttcaggcggcagacggatagcagcgggaaagagtggtgggtgaccaacaatacctactggaggctgcgggccgagccaggctacgggaacatggatggggccgtgctctggtagccctggccccgggggcaggaggctctggttcctcactcctcctgcctccacccccctaccatgaacacatgggtgaggccgggctccccgcctcactgcccttgagaccaaaggggcagccctggccctccctcccctctgctggccagagggtctgcattctcagcccaccccccaaccccanccgtttggggtgaaaancanaatcntgtgctttcccccanttctcnttgncccaaanaaccagcnttgttaaaaccctttcccnctttcncaattccnaatttcnggtccccttttggggnantttggggaaaactctggtncccannattnnnttcccantttcnagtgcnttcnangaaaaagggaaantncctnnanccnnccccaagttttnnttaccagantntnttcccnccttttaantttcantntattaanaaaaaaannnattttttnccctccctttngcnnntaanaaanttttttntctctnctngnccnngagngatttnnccccccctttgtaatncctgncncccctcncgnctcnnancttnntcccntantaaaaaagccgcnaactttcaactctcttccctanatnannggtcccccctntnacncnngnncnccnanagaanncnnntnttaagagatccccangtttntcttnncccnncaganttgnatttttttttctaaaa

SEQ ID NO: 149 - DNA, 256 bp, Homo Sapiens
attagagaaattactatgagaggatcgcatcaccatcaccatcacggatcctatttaggtgacactatagaatcgtcgacccacgcgtccgcgccgcgcaccgctccgagggccagcgccacccgctccgcagccggcaccatgcgcgagatcgtgcacatccaggcgggccagtgcggcaaccagatcggcgccaagttttgggaggtcatcagcgatgagcatgggatcgaccccacaggcagttaccatggag

SEQ ID NO: 150 - DNA, 1407 bp, Homo Sapiens
  misc_feature (4)..(4): n is a, c, g, or t
  misc_feature (754)..(754): n is a, c, g, or t
  misc_feature (757)..(757): n is a, c, g, or t
  misc_feature (829)..(829): n is a, c, g, or t
  misc_feature (844)..(844): n is a, c, g, or t
  misc_feature (876)..(876): n is a, c, g, or t
  misc_feature (882)..(882): n is a, c, g, or t
  misc_feature (899)..(899): n is a, c, g, or t
  misc_feature (917)..(917): n is a, c, g, or t
  misc_feature (943)..(943): n is a, c, g, or t
  misc_feature (959)..(959): n is a, c, g, or t
  misc_feature (975)..(976): n is a, c, g, or t
  misc_feature (978)..(978): n is a, c, g, or t
  misc_feature (989)..(989): n is a, c, g, or t
  misc_feature (991)..(991): n is a, c, g, or t
  misc_feature (997)..(997): n is a, c, g, or t
  misc_feature (1007)..(1008): n is a, c, g, or t
  misc_feature (1021)..(1021): n is a, c, g, or t
  misc_feature (1029)..(1029): n is a, c, g, or t
  misc_feature (1031)..(1031): n is a, c, g, or t
  misc_feature (1035)..(1037): n is a, c, g, or t
  misc_feature (1040)..(1040): n is a, c, g, or t
  misc_feature (1053)..(1053): n is a, c, g, or t
  misc_feature (1062)..(1062): n is a, c, g, or t
  misc_feature (1072)..(1073): n is a, c, g, or t
  misc_feature (1084)..(1084): n is a, c, g, or t
  misc_feature (1089)..(1090): n is a, c, g, or t
  misc_feature (1097)..(1097): n is a, c, g, or t
  misc_feature (1104)..(1104): n is a, c, g, or t
  misc_feature (1113)..(1113): n is a, c, g, or t
  misc_feature (1115)..(1115): n is a, c, g, or t
  misc_feature (1126)..(1126): n is a, c, g, or t
  misc_feature (1131)..(1131): n is a, c, g, or t
  misc_feature (1135)..(1135): n is a, c, g, or t
  misc_feature (1139)..(1139): n is a, c, g, or t
  misc_feature (1143)..(1144): n is a, c, g, or t
  misc_feature (1153)..(1154): n is a, c, g, or t
  misc_feature (1156)..(1156): n is a, c, g, or t
  misc_feature (1169)..(1169): n is a, c, g, or t
  misc_feature (1184)..(1184): n is a, c, g, or t
  misc_feature (1187)..(1188): n is a, c, g, or t
  misc_feature (1191)..(1191): n is a, c, g, or t
  misc_feature (1195)..(1196): n is a, c, g, or t
  misc_feature (1201)..(1201): n is a, c, g, or t
  misc_feature (1203)..(1204): n is a, c, g, or t
  misc_feature (1207)..(1207): n is a, c, g, or t
  misc_feature (1220)..(1221): n is a, c, g, or t
  misc_feature (1228)..(1230): n is a, c, g, or t
  misc_feature (1235)..(1235): n is a, c, g, or t
  misc_feature (1248)..(1248): n is a, c, g, or t
  misc_feature (1256)..(1256): n is a, c, g, or t
  misc_feature (1263)..(1265): n is a, c, g, or t
  misc_feature (1268)..(1268): n is a, c, g, or t
  misc_feature (1274)..(1276): n is a, c, g, or t
  misc_feature (1279)..(1279): n is a, c, g, or t
  misc_feature (1281)..(1281): n is a, c, g, or t
  misc_feature (1286)..(1287): n is a, c, g, or t
  misc_feature (1294)..(1297): n is a, c, g, or t
  misc_feature (1303)..(1303): n is a, c, g, or t
  misc_feature (1305)..(1307): n is a, c, g, or t
  misc_feature (1310)..(1310): n is a, c, g, or t
  misc_feature (1315)..(1315): n is a, c, g, or t
  misc_feature (1319)..(1319): n is a, c, g, or t
  misc_feature (1324)..(1325): n is a, c, g, or t
  misc_feature (1329)..(1329): n is a, c, g, or t
  misc_feature (1331)..(1332): n is a, c, g, or t
  misc_feature (1334)..(1335): n is a, c, g, or t
  misc_feature (1337)..(1338): n is a, c, g, or t
  misc_feature (1344)..(1344): n is a, c, g, or t
  misc_feature (1348)..(1348): n is a, c, g, or t
  misc_feature (1357)..(1358): n is a, c, g, or t
  misc_feature (1360)..(1360): n is a, c, g, or t
  misc_feature (1367)..(1367): n is a, c, g, or t
  misc_feature (1369)..(1370): n is a, c, g, or t
  misc_feature (1378)..(1378): n is a, c, g, or t
  misc_feature (1380)..(1380): n is a, c, g, or t
  misc_feature (1386)..(1386): n is a, c, g, or t
  misc_feature (1390)..(1390): n is a, c, g, or t
  misc_feature (1393)..(1393): n is a, c, g, or t
  misc_feature (1400)..(1400): n is a, c, g, or t
  misc_feature (1402)..(1403): n is a, c, g, or t
  misc_feature (1405)..(1405): n is a, c, g, or t
  misc_feature (1407)..(1407): n is a, c, g, or t
aganaattactatgagaggatcgcatcaccatcaccatcacggatcctatttaggtgacactatagaatcgtcgacccacgcgtccggcgggcagggtgctgacggctgggccacacgctgtctcattgtctctgcagtccgctgcccggcccggaagcggaggaactcacgggatggggacccgctgccctccagcctcagctgcaaggtgcacgtggcatcggtgaacaacttccccacggctgcgggcctggcctcctcagcggcgggctatgcctgcctaggtaccttttgttgcccttgtcgcaggccgcaacctctgcaggccgtgaacagagagtgtccgagagtggaactagcggaggtgggggacagacggctgggccggtgaatgctggcctcaaaggctgatggcccagaagccctgtcatctggaaatccccatttgccgtggggtgtgggacgttcctggggcggtgagctgtcagggagcacagcgcaggcagctctgaggaccctccctgaatccgcatgcctgcagcctacaccctggcccgtgtctacggcgtggagagtgacctctcagaagtggctcgccggggctcaggcagcgcctgccggagcctgtatgggggctttgtggagtggcagatgggagagcaggccgacgggaaggacagcatcgctcggcaagtggcccccgagtcacactggcctgaactccgcgtgctcatccttgtggtgagcgctganaanaagctgacaggcagtaccgtgggcatgcgggccagtgtggagaccagccccctgcttcggttccgggccgantccgtggtgcccgcncgcatggcggaaaatggccccctgcatccggnaacganacttcccccaactttcncccagcttgaccatgaangaacagcaaccagtttccacgccacntgccctcgaaaccttncccgcccatctcttanntnaatgccaattntnctgggngcatcatccnncttggtgcaaccnctttcaancncccnnncanggggaaaaccaanggggcgtanaccttttaanncgggcccccanggccnnaattttncccctgnaaaaaactntngctaaattttngctcnttgntggnaagnnttttccccnngntcaaaggaaaaanttttttaaggcctcnatnnaancccnnccctntnnaantaaatttaagttnncttggcnnngaacnaaaccccgggggnccaaaaanttatttnnncangggggnnnggncnaaatnnaaaaacnnnncccccntnnnttntaaanttgnaaaannattntnntnntnnaaaaancttncctttaaanngngcccccnannaaaaaaanangggggncacntcnaaatagngnntntn

SEQ ID NO: 151 - DNA, 256 bp, Homo Sapiens
  misc_feature (10)..(10): n is a, c, g, or t
  misc_feature (44)..(44): n is a, c, g, or t
  misc_feature (54)..(54): n is a, c, g, or t
  misc_feature (76)..(76): n is a, c, g, or t
tcgagaaatntaaaaaattatttgctttgtgagcggatacaatntaatagattnattgtgagcggataacaatttncacagaattattaaagaggagaaattaactatgagaggatcgcatcaccatcaccatcacggatcctatttaggtgacactatagaatcgtcgacccacgcgtccgcggaccctgcagccgcagagatgttgatgcctaagaagaaccggattgccatttatgaactcctttttaaggag

SEQ ID NO: 152 - DNA, 1216 bp, Homo Sapiens
  misc_feature (824)..(824): n is a, c, g, or t
  misc_feature (912)..(912): n is a, c, g, or t
  misc_feature (914)..(914): n is a, c, g, or t
  misc_feature (953)..(953): n is a, c, g, or t
  misc_feature (958)..(958): n is a, c, g, or t
  misc_feature (1010)..(1010): n is a, c, g, or t
  misc_feature (1017)..(1017): n is a, c, g, or t
  misc_feature (1019)..(1019): n is a, c, g, or t
  misc_feature (1021)..(1021): n is a, c, g, or t
  misc_feature (1029)..(1029): n is a, c, g, or t
  misc_feature (1033)..(1033): n is a, c, g, or t
  misc_feature (1075)..(1075): n is a, c, g, or t
  misc_feature (1078)..(1078): n is a, c, g, or t
  misc_feature (1085)..(1085): n is a, c, g, or t
  misc_feature (1087)..(1088): n is a, c, g, or t
  misc_feature (1090)..(1091): n is a, c, g, or t
  misc_feature (1098)..(1098): n is a, c, g, or t
  misc_feature (1100)..(1100): n is a, c, g, or t
  misc_feature (1109)..(1109): n is a, c, g, or t
  misc_feature (1144)..(1144): n is a, c, g, or t
  misc_feature (1146)..(1146): n is a, c, g, or t
  misc_feature (1148)..(1148): n is a, c, g, or t
  misc_feature (1153)..(1154): n is a, c, g, or t
  misc_feature (1160)..(1160): n is a, c, g, or t
  misc_feature (1171)..(1171): n is a, c, g, or t
  misc_feature (1178)..(1178): n is a, c, g, or t
  misc_feature (1186)..(1186): n is a, c, g, or t
  misc_feature (1192)..(1192): n is a, c, g, or t
  misc_feature (1195)..(1195): n is a, c, g, or t
  misc_feature (1204)..(1204): n is a, c, g, or t
  misc_feature (1209)..(1209): n is a, c, g, or t
  misc_feature (1216)..(1216): n is a, c, g, or t
taattagagaaattactatgagaggatcgcatcaccatcaccatcacggatcctatttaggtgacactatagaatcgtcgacccacgcgtccggcctggcaatggggaactctgagggctgcaataccaagaaggagggtgacctgatagctgctcaggctcggctgaaggacctggaggctctgctgaactccaaggaggccgcactgagcactgctctcagtgagaagcgcacgctggagggcgagctgcatgatctgcggggccaggtggccaagcttgaggcagccctaggtgaggccaagaagcaacttcaggatgagatgctgcggcgggtggatgctgagaacaggctgcagaccatgaaggaggaactggacttccagaagaacatctacagtgaggagctgcgtgagaccaagcgccgtcatgagacccgactggtggagattgacaatgggaagcagcgtgagtttgagagccggctggcggatgcgctgcaggaactgcgggcccagcatgaggaccaggtggagcagtataagaaggagctggagaagacttattctgccaagctggacaatgccaggcagtctgctgagaggaacagcaacctggtgggggctgcccacgaggagctgcagcagtcgcgcatccgcatcgacagcctctctgcccagctcagccagctccagaagcagctggcagccaaggaggcgaagcttcgagacctggaggactcactggcccgtgagcgggacaccagccggcggctgctggcggaaaaggagcgggagatggccgagatgcgggcaaggatgcancagcagctggacgagtaccaggagcttctggacatcaagctggccctggacatggagatccacgcctaccgcaagctcttggaaggcnangaagaaaggctacccctgtcccccagccctacctcgcancgcanccgtggccgtgcttcctctcctcatcccaaaaacagggtgggggcagcgtcnccaaaancncnaactggantccntgaaagcccaacagttttcaagcacgcacgcataacggcccntgncctgaananntnnaataaanangccaatttntccgctgcccacaatccatgagaacatcctggcantngnaatanncccaanggaaaatcctngttaatncggttccnaaattnccnaaggggggnggggnaaattgn

SEQ ID NO: 153 - DNA, 1215 bp, Homo Sapiens
  misc_feature (1)..(1): n is a, c, g, or t
  misc_feature (939)..(939): n is a, c, g, or t
  misc_feature (959)..(959): n is a, c, g, or t
  misc_feature (966)..(966): n is a, c, g, or t
  misc_feature (982)..(982): n is a, c, g, or t
  misc_feature (994)..(994): n is a, c, g, or t
  misc_feature (1037)..(1037): n is a, c, g, or t
  misc_feature (1042)..(1042): n is a, c, g, or t
  misc_feature (1050)..(1050): n is a, c, g, or t
  misc_feature (1066)..(1066): n is a, c, g, or t
  misc_feature (1072)..(1072): n is a, c, g, or t
  misc_feature (1075)..(1075): n is a, c, g, or t
  misc_feature (1080)..(1080): n is a, c, g, or t
  misc_feature (1092)..(1092): n is a, c, g, or t
  misc_feature (1103)..(1103): n is a, c, g, or t
  misc_feature (1105)..(1106): n is a, c, g, or t
  misc_feature (1111)..(1111): n is a, c, g, or t
  misc_feature (1115)..(1116): n is a, c, g, or t
  misc_feature (1124)..(1125): n is a, c, g, or t
  misc_feature (1143)..(1143): n is a, c, g, or t
  misc_feature (1151)..(1151): n is a, c, g, or t
  misc_feature (1153)..(1153): n is a, c, g, or t
  misc_feature (1156)..(1156): n is a, c, g, or t
  misc_feature (1164)..(1164): n is a, c, g, or t
  misc_feature (1171)..(1171): n is a, c, g, or t
  misc_feature (1183)..(1184): n is a, c, g, or t
  misc_feature (1190)..(1190): n is a, c, g, or t
  misc_feature (1194)..(1194): n is a, c, g, or t
  misc_feature (1196)..(1196): n is a, c, g, or t
  misc_feature (1209)..(1209): n is a, c, g, or t
  misc_feature (1215)..(1215): n is a, c, g, or t
naatagagaaattactatgagaggatcgcatcaccatcaccatcacggatcctatttaggtgacactatagaatcgtcgacccacgcgtccgatgtcatcgcacagtctcagtccggcacaggaaaaacagccaccttcagtatctcagtcctccagtgtttggatattcaggttcgtgaaactcaagctttgatcttggctcccacaagagagttggctgtgcagatccagaaggggctgcttgctctcggtgactacatgaatgtccagtgccatgcctgcattggaggcaccaatgttggcgaggacatcaggaagctggattacggacagcatgttgtcgcgggcactccagggcgtgtttttgatatgattcgtcgcagaagcctaaggacacgtgctatcaaaatgttggttttggatgaagctgatgaaatgttgaataaaggtttcaaagagcagatttacgatgtatacaggtacctgcctccagccacacaggtggttctcatcagtgccacgctgccacacgagattctggagatgaccaacaagttcatgaccgacccaatccgcatcttggtgaaacgtgatgaattgactctggaaggcatcaagcaatttttcgtggcagtggagagggaagagtggaaatttgacactctgtgtgacctctacgacacactgaccatcactcaggcggtcatcttctgcaacaccaaaagaaaggtggactggctgacggagaaaatgagggaagccaacttcactgtatcctcaatgcatggagacatgccccagaaagagcgggagtccatcatgaaggagttccggtcgggcgccagccgagtgcttatttctacagatgtctgggccagggggttggatgtcccctcaggtgtccctcatcattaactatgatctccctaataacaganaattgtacttaccccggaantgggganatcaggtcgatacggnccggaagggggnggccattaactttgtaaagaatgaccaacctccccatcctcanaaaantccgagcnagtaacttttcccccncaaatngangaaangcccaataaacntttgcttaatntnntctgnaacnnccaaatcnngggaaggagggaaacggntcccccgncnggnacccccgnttggaanattttaaatccnnattccncttnanggggttttaaggnactttn

SEQ ID NO: 154 - DNA, 256 bp, Homo Sapiens
atagagaaaatactatgagaggatcgcatcaccatcaccatcacggatcctatttaggtgacactatagaatcgtcgacccacgcgtccggggacagcgaaatggaggggtgtgtgtctaacctaatggtctgcaacctggcctacagcgggaagctggaagagttgaaggagagtattctggccgataaatccctggctactagaactgaccaggacagcagaactgcattgcactgggcatgctcagctggaca

SEQ ID NO: 155 - DNA, 1372 bp, Homo Sapiens
  misc_feature (876)..(876): n is a, c, g, or t
  misc_feature (881)..(881): n is a, c, g, or t
  misc_feature (892)..(892): n is a, c, g, or t
  misc_feature (944)..(944): n is a, c, g, or t
  misc_feature (962)..(962): n is a, c, g, or t
  misc_feature (974)..(974): n is a, c, g, or t
  misc_feature (1010)..(1010): n is a, c, g, or t
  misc_feature (1018)..(1018): n is a, c, g, or t
  misc_feature (1026)..(1026): n is a, c, g, or t
  misc_feature (1028)..(1028): n is a, c, g, or t
  misc_feature (1035)..(1035): n is a, c, g, or t
  misc_feature (1043)..(1043): n is a, c, g, or t
  misc_feature (1047)..(1047): n is a, c, g, or t
  misc_feature (1058)..(1058): n is a, c, g, or t
  misc_feature (1070)..(1070): n is a, c, g, or t
  misc_feature (1079)..(1081): n is a, c, g, or t
  misc_feature (1083)..(1083): n is a, c, g, or t
  misc_feature (1090)..(1090): n is a, c, g, or t
  misc_feature (1102)..(1102): n is a, c, g, or t
  misc_feature (1119)..(1119): n is a, c, g, or t
  misc_feature (1129)..(1129): n is a, c, g, or t
  misc_feature (1142)..(1142): n is a, c, g, or t
  misc_feature (1147)..(1147): n is a, c, g, or t
  misc_feature (1151)..(1151): n is a, c, g, or t
  misc_feature (1153)..(1153): n is a, c, g, or t
  misc_feature (1157)..(1157): n is a, c, g, or t
  misc_feature (1161)..(1161): n is a, c, g, or t
  misc_feature (1167)..(1167): n is a, c, g, or t
  misc_feature (1173)..(1174): n is a, c, g, or t
  misc_feature (1179)..(1179): n is a, c, g, or t
  misc_feature (1181)..(1181): n is a, c, g, or t
  misc_feature (1184)..(1184): n is a, c, g, or t
  misc_feature (1200)..(1200): n is a, c, g, or t
  misc_feature (1203)..(1203): n is a, c, g, or t
  misc_feature (1210)..(1210): n is a, c, g, or t
  misc_feature (1213)..(1213): n is a, c, g, or t
  misc_feature (1215)..(1215): n is a, c, g, or t
  misc_feature (1219)..(1219): n is a, c, g, or t
  misc_feature (1222)..(1222): n is a, c, g, or t
  misc_feature (1224)..(1224): n is a, c, g, or t
  misc_feature (1226)..(1226): n is a, c, g, or t
  misc_feature (1236)..(1237): n is a, c, g, or t
  misc_feature (1240)..(1240): n is a, c, g, or t
  misc_feature (1243)..(1244): n is a, c, g, or t
  misc_feature (1247)..(1248): n is a, c, g, or t
  misc_feature (1250)..(1250): n is a, c, g, or t
  misc_feature (1256)..(1256): n is a, c, g, or t
  misc_feature (1259)..(1259): n is a, c, g, or t
  misc_feature (1264)..(1264): n is a, c, g, or t
  misc_feature (1268)..(1269): n is a, c, g, or t
  misc_feature (1272)..(1272): n is a, c, g, or t
  misc_feature (1274)..(1274): n is a, c, g, or t
  misc_feature (1278)..(1280): n is a, c, g, or t
  misc_feature (1282)..(1282): n is a, c, g, or t
  misc_feature (1288)..(1288): n is a, c, g, or t
  misc_feature (1291)..(1291): n is a, c, g, or t
  misc_feature (1299)..(1299): n is a, c, g, or t
  misc_feature (1302)..(1303): n is a, c, g, or t
  misc_feature (1307)..(1307): n is a, c, g, or t
  misc_feature (1309)..(1309): n is a, c, g, or t
  misc_feature (1311)..(1311): n is a, c, g, or t
  misc_feature (1315)..(1315): n is a, c, g, or t
  misc_feature (1317)..(1317): n is a, c, g, or t
  misc_feature (1320)..(1320): n is a, c, g, or t
  misc_feature (1325)..(1327): n is a, c, g, or t
  misc_feature (1329)..(1332): n is a, c, g, or t
  misc_feature (1336)..(1337): n is a, c, g, or t
  misc_feature (1341)..(1345): n is a, c, g, or t
  misc_feature (1349)..(1358): n is a, c, g, or t
  misc_feature (1360)..(1360): n is a, c, g, or t
  misc_feature (1362)..(1362): n is a, c, g, or t
  misc_feature (1370)..(1370): n is a, c, g, or t
caatagagaaattactatgagaggatcgcatcaccatcaccatcacggatcctatttaggtgacactatagaatcgtcgacccacgcgtccggccccttggagagagaggctgcctcagccagtggcacaggagactccaaggagctactgacattcctaagagtggaggaggaggaggagccttgctgggccagggaaacaaagtttacattgtcctgtagctttaaaaccacagctgggcagggtgagaagctagatgcccctgcagtttggccctggagccagggcagaggaatgtagggcctgcatggagaagggttctgccctgcctgaggaggaggacacagcacaagggcacattgcccatggctgggaacatgacccagcctgaaagatacaggggatcatgttaaaaatagcagtattatttttcgtctcaatggtattgtaactaagttatttactcctcctgctcctcacccctgtagggaaaccttggagaggagagtggcaggtgggctgcctgctgtgttaagaggacttagtttgtgatgtaaggcactgtcaggaatggggggcgggccagggtgggaagagaagaaatagcagagcctattttggtgaggttttttgtttttaagtcaaagaagactcagtatgctttccctgaggaatgaaaaagggattgaggagttgcctgactcctgggtgggtggggtacaggcagttaggtgctgaatgaagctgccatccttgctgcagcttctaactggtaaaaagatccagggatggagatgggaaggttagaaaggcagccctcacctctgaagacagaggccggggtccaggcccgtgggcgcaaaggtgcctcatancatanccagcattcancacacacaaacctactgcccacatttgggcctcagggttggccatttgctanttctgctgccctcttaanatctgactgccnaaataaatcatcctcatgtcaaaaaaaaaaaaaaanggcggccnctccctananggagtcnaattaacntaantaactgaactnggactcctgttnaaaaatccnnnangacctcnaaactcctctgnatttttcaaaccctcgntgcccccggngttttttttgggnaaaanccancnactnggcnaatttncggacnnaggancnaanggaaaaaaatcccggnaanccccctnaantncccnggncncnaaaaaatttnnggnttnnccnntnccaggnccnaaacnaccnnccngnaatnnncntttaanccnaaaaaaanccnntttncncntttncnttnccccnnnannnncccnntttnnnnnaaannnnnnnnnnananttcccctntc

SEQ ID NO: 156 - DNA, 256 bp, Homo Sapiens
  misc_feature (2)..(2): n is a, c, g, or t
tnaactatgagaggatcgcatcaccatcaccatcacggatcctatttaggtgacactatagaatcgtcgacccacgcgtccgcggacgcgtgggtgctggttatcctgaggcccgggccctacatctgtgcagagtgggaaatgggaggattacctgcttggctgctagagaaagagtctattcttctccgctcctccgacccagattacctggcagctgtggacaagtggttgggagtccttctgcccaagatga

SEQ ID NO: 157 - DNA, 256 bp, Homo Sapiens
  misc_feature (2)..(2): n is a, c, g, or t
  misc_feature (4)..(4): n is a, c, g, or t
tnanctatgagaggatcgcatcaccatcaccatcacggatcctatttaggtgacactatagaatcgtcgacccacgcgtccggccccacaccccaccagacagtgcgcctggaggccctggatgagagtggcagctactgggtcagtgacaagaggctgcccccctgctcactcagccaggccctcacctacttcctggacatcaccacacccccaacccagctgctgctccaaaagctggcccaggtggccacag

SEQ ID NO: 158 - DNA, 1302 bp, Homo Sapiens
  misc_feature (1)..(1): n is a, c, g, or t
  misc_feature (3)..(3): n is a, c, g, or t
  misc_feature (913)..(936): n is a, c, g, or t
  misc_feature (939)..(939): n is a, c, g, or t
  misc_feature (964)..(964): n is a, c, g, or t
  misc_feature (968)..(968): n is a, c, g, or t
  misc_feature (971)..(971): n is a, c, g, or t
  misc_feature (976)..(976): n is a, c, g, or t
  misc_feature (978)..(978): n is a, c, g, or t
  misc_feature (980)..(980): n is a, c, g, or t
  misc_feature (1029)..(1029): n is a, c, g, or t
  misc_feature (1048)..(1048): n is a, c, g, or t
  misc_feature (1059)..(1059): n is a, c, g, or t
  misc_feature (1066)..(1066): n is a, c, g, or t
  misc_feature (1084)..(1084): n is a, c, g, or t
  misc_feature (1090)..(1090): n is a, c, g, or t
  misc_feature (1094)..(1094): n is a, c, g, or t
  misc_feature (1100)..(1101): n is a, c, g, or t
  misc_feature (1103)..(1103): n is a, c, g, or t
  misc_feature (1109)..(1111): n is a, c, g, or t
  misc_feature (1115)..(1115): n is a, c, g, or t
  misc_feature (1119)..(1119): n is a, c, g, or t
  misc_feature (1124)..(1124): n is a, c, g, or t
  misc_feature (1131)..(1131): n is a, c, g, or t
  misc_feature (1134)..(1134): n is a, c, g, or t
  misc_feature (1152)..(1152): n is a, c, g, or t
  misc_feature (1156)..(1156): n is a, c, g, or t
  misc_feature (1162)..(1162): n is a, c, g, or t
  misc_feature (1165)..(1165): n is a, c, g, or t
  misc_feature (1176)..(1177): n is a, c, g, or t
  misc_feature (1181)..(1181): n is a, c, g, or t
  misc_feature (1185)..(1185): n is a, c, g, or t
  misc_feature (1203)..(1203): n is a, c, g, or t
  misc_feature (1208)..(1210): n is a, c, g, or t
  misc_feature (1213)..(1214): n is a, c, g, or t
  misc_feature (1216)..(1216): n is a, c, g, or t
  misc_feature (1221)..(1222): n is a, c, g, or t
  misc_feature (1224)..(1226): n is a, c, g, or t
  misc_feature (1230)..(1230): n is a, c, g, or t
  misc_feature (1232)..(1233): n is a, c, g, or t
  misc_feature (1237)..(1237): n is a, c, g, or t
  misc_feature (1239)..(1240): n is a, c, g, or t
  misc_feature (1244)..(1244): n is a, c, g, or t
  misc_feature (1249)..(1250): n is a, c, g, or t
  misc_feature (1255)..(1258): n is a, c, g, or t
  misc_feature (1260)..(1260): n is a, c, g, or t
  misc_feature (1269)..(1269): n is a, c, g, or t
  misc_feature (1272)..(1274): n is a, c, g, or t
  misc_feature (1290)..(1290): n is a, c, g, or t
  misc_feature (1300)..(1300): n is a, c, g, or t
  misc_feature (1302)..(1302): n is a, c, g, or t
nantagagaaattactatgagaggatcgcatcaccatcaccatcacggatcctatttaggtgacactatagaatcgtcgacccacgcgtccgggatgcgagaggcagtccaggaaatgaaggaccatatggtcagcccaacagccgtagcatttttggagaggaataacagagagatactcgcaggcaagccagctgcccagaagtcacccagcgacctgctggatgccagcgcagtctcggccacatctcgctacatcgaggagcagcaggccacacagcagctgatcatggatgaacaggatcaacagctggagatggtgtctgggagcatccaggttctgaagcacatgtccggccgcgttggagaagagctggacgagcagggcatcatgctggatgccttcgcccaagagatggaccacacccagtcccgcatggacggggtcctcaggaagttggccaaagtatcccacatgacgagtgaccgccgacagtggtgtgccatcgccgtgctagtgggggtgcttctcctcgttctcatcttactattctctctctgaccccagccctccctggcaggctggtcccttaagcctggggagccaccaagcactttggagctggcctcgccccctaggaggagagggtccctcctgggtagctggagagtagagggtcccgcctggggagctgtccccatggctctcccctagagccagtgggacccttcaggaccctgggctggaaccaccaccactggtcctgtctcaagtgcacttagggggtggtggaggcagggacacctgagacacacctgtctccatttccagttccaggaccccaaagccatttgcccctgtgccttatacacgtgccaacctggaaaataaaatgtcagccttttttataannnnnnnnnnnnnnnnnnnnnnnnaanggcggccgctccctatagtgagtcntatnaancttantnanctgaacttggactcctgttgataaatccagtaatgacctcaaaactccntctggattttttcaaaacnctcggttgccnccgggcntttttttttggtgaaaantccaanctancttggnnanattttnnngganctanggaanctaaatnggnaaaaaaaaaatccctggnaatncccccnttnaaatttcccannggcntccnaaaaaaaatttttagggnttttnnnccnntngcccnngnnnccananncaancnnttcncctgnnaattnnnncntttttaaanccnnnaaaaaaaaaaccccanttttttcccncn

SEQ ID NO: 159 - DNA, 1198 bp, Homo Sapiens
  misc_feature (3)..(3): n is a, c, g, or t
  misc_feature (940)..(940): n is a, c, g, or t
  misc_feature (945)..(945): n is a, c, g, or t
  misc_feature (979)..(979): n is a, c, g, or t
  misc_feature (984)..(984): n is a, c, g, or t
  misc_feature (1007)..(1007): n is a, c, g, or t
  misc_feature (1026)..(1026): n is a, c, g, or t
  misc_feature (1029)..(1029): n is a, c, g, or t
  misc_feature (1032)..(1032): n is a, c, g, or t
  misc_feature (1035)..(1035): n is a, c, g, or t
  misc_feature (1039)..(1039): n is a, c, g, or t
  misc_feature (1051)..(1051): n is a, c, g, or t
  misc_feature (1053)..(1053): n is a, c, g, or t
  misc_feature (1056)..(1056): n is a, c, g, or t
  misc_feature (1058)..(1058): n is a, c, g, or t
  misc_feature (1067)..(1067): n is a, c, g, or t
  misc_feature (1071)..(1071): n is a, c, g, or t
  misc_feature (1089)..(1089): n is a, c, g, or t
  misc_feature (1091)..(1091): n is a, c, g, or t
  misc_feature (1108)..(1108): n is a, c, g, or t
  misc_feature (1133)..(1133): n is a, c, g, or t
  misc_feature (1135)..(1135): n is a, c, g, or t
  misc_feature (1138)..(1138): n is a, c, g, or t
  misc_feature (1140)..(1140): n is a, c, g, or t
  misc_feature (1144)..(1144): n is a, c, g, or t
  misc_feature (1162)..(1162): n is a, c, g, or t
  misc_feature (1180)..(1180): n is a, c, g, or t
  misc_feature (1184)..(1184): n is a, c, g, or t
  misc_feature (1188)..(1188): n is a, c, g, or t
ctnttagagaaattactatgagaggatcgcatcaccatcaccatcacggatcctatttaggtgacactatagaatcgtcgacccacgcgtccgcccacgcgtccgggaaccacaatgaaggaatggtgactcgctgcatcattgaggtcctctcaaatgccttgtcgaagtccagcgctccacccatcacccctgagtgccgccaagtcctgaagacgagtagaaaagacgtcaaagacaaagagacaactgaaaatgaaaacacaaagtttgaagtaagattgttaagagacccagctgatgcctcggaagcccacgagtcctccagcaggggagaggcaggagccccaggggaggaggacatccaaggcccaacaaaggcagacacagagaaatgggcagagggaggcgggcacagccgagagcgagcggatgagccccagtggagcctctatccctccgacagccaagtctctgaagaagtgaagacacgccattctgagaagagccagagagaggatgaggaggaggaggagggagagaactatcaaaaaggggagcgaggggaagatagcagtgaagagaaacaccttgaagagccaggagagacacaaaacgcttttctcaatgaaagaaagcaggcttcagctataaaaaaagaggagttagtggccagatcggaaacacatgctgccgggcattctcaggagaagacacatagccgagagaagagtagccaggagagtggagaggagacagggagccaggagaatcacccccaggagtctaaaggccaaccccgaagccaggaagaatctgaggaaggtgaggaagatgccacctctgaggtggacaaacgacgcacgaggcccagaccccaccacgggaggagcaggcccgacaggtcctctcagggagggagtctttcctctgaggaaanggacncccccggaggaatctgaggagtcaaacgtcagcntggcngtttagggaaaagagggaccccnttcaccccttcgggcttcnaanaanacntganttggaaaaaatnanggntntccggcgtncagnccctgagactggatgggncnttttgggcaaaaaattnaaaataaggctccaaactccaatgngnaantnggtnaggagaaaaaaattcccncttaacttgtaaatgccntggntggnaaaaatggaa

SEQ ID NO: 160 - DNA, 1389 bp, Homo Sapiens
  misc_feature (799)..(799): n is a, c, g, or t
  misc_feature (837)..(837): n is a, c, g, or t
  misc_feature (870)..(870): n is a, c, g, or t
  misc_feature (905)..(905): n is a, c, g, or t
  misc_feature (907)..(907): n is a, c, g, or t
  misc_feature (921)..(921): n is a, c, g, or t
  misc_feature (931)..(931): n is a, c, g, or t
  misc_feature (949)..(949): n is a, c, g, or t
  misc_feature (953)..(953): n is a, c, g, or t
  misc_feature (976)..(976): n is a, c, g, or t
  misc_feature (989)..(989): n is a, c, g, or t
  misc_feature (1037)..(1037): n is a, c, g, or t
  misc_feature (1045)..(1045): n is a, c, g, or t
  misc_feature (1049)..(1049): n is a, c, g, or t
  misc_feature (1059)..(1059): n is a, c, g, or t
  misc_feature (1065)..(1066): n is a, c, g, or t
  misc_feature (1077)..(1077): n is a, c, g, or t
  misc_feature (1086)..(1086): n is a, c, g, or t
  misc_feature (1091)..(1091): n is a, c, g, or t
  misc_feature (1102)..(1102): n is a, c, g, or t
  misc_feature (1122)..(1124): n is a, c, g, or t
  misc_feature (1131)..(1131): n is a, c, g, or t
  misc_feature (1137)..(1137): n is a, c, g, or t
  misc_feature (1139)..(1139): n is a, c, g, or t
  misc_feature (1147)..(1147): n is a, c, g, or t
  misc_feature (1150)..(1150): n is a, c, g, or t
  misc_feature (1152)..(1152): n is a, c, g, or t
  misc_feature (1155)..(1155): n is a, c, g, or t
  misc_feature (1169)..(1169): n is a, c, g, or t
  misc_feature (1174)..(1175): n is a, c, g, or t
  misc_feature (1181)..(1183): n is a, c, g, or t
  misc_feature (1189)..(1189): n is a, c, g, or t
  misc_feature (1191)..(1191): n is a, c, g, or t
  misc_feature (1195)..(1198): n is a, c, g, or t
  misc_feature (1208)..(1208): n is a, c, g, or t
  misc_feature (1210)..(1210): n is a, c, g, or t
  misc_feature (1216)..(1216): n is a, c, g, or t
  misc_feature (1218)..(1218): n is a, c, g, or t
  misc_feature (1221)..(1221): n is a, c, g, or t
  misc_feature (1230)..(1233): n is a, c, g, or t
  misc_feature (1235)..(1235): n is a, c, g, or t
  misc_feature (1248)..(1249): n is a, c, g, or t
  misc_feature (1265)..(1265): n is a, c, g, or t
  misc_feature (1267)..(1267): n is a, c, g, or t
  misc_feature (1273)..(1273): n is a, c, g, or t
  misc_feature (1276)..(1276): n is a, c, g, or t
  misc_feature (1278)..(1280): n is a, c, g, or t
  misc_feature (1290)..(1291): n is a, c, g, or t
  misc_feature (1305)..(1308): n is a, c, g, or t
  misc_feature (1321)..(1321): n is a, c, g, or t
  misc_feature (1323)..(1323): n is a, c, g, or t
  misc_feature (1327)..(1327): n is a, c, g, or t
  misc_feature (1329)..(1329): n is a, c, g, or t
  misc_feature (1333)..(1334): n is a, c, g, or t
  misc_feature (1336)..(1337): n is a, c, g, or t
  misc_feature (1343)..(1346): n is a, c, g, or t
  misc_feature (1349)..(1351): n is a, c, g, or t
  misc_feature (1353)..(1354): n is a, c, g, or t
  misc_feature (1358)..(1358): n is a, c, g, or t
  misc_feature (1364)..(1365): n is a, c, g, or t
  misc_feature (1367)..(1367): n is a, c, g, or t
  misc_feature (1371)..(1371): n is a, c, g, or t
  misc_feature (1377)..(1377): n is a, c, g, or t
  misc_feature (1384)..(1384): n is a, c, g, or t
  misc_feature (1386)..(1386): n is a, c, g, or t
attagagagaattactatggagaggatcgcatcaccatcaccatcacgggatcctatttaggtgacactatagaatcgtcgacccacgcgtccgcccacgcgtccggtgagaacgtgttcaaggtctgtgacgagccccacccactgctggtaaaggagatgatccagcactgtgtgaatgccaacattgacgaagcctacaagattcttgctcacttgtggcatctgggctactcaccagaagatatcattggcaacatctttcgagtgtgtaaaactttccaaatggcagaatacctgaaactggagtttatcaaggaaattggatacactcacatgaaaatagcggaaggagtgaactctcttttgcagatggcaggcctcctggcaaggctgtgtcagaagacaatggccccggtggccagttagagcagagacttcactgactgacttacaggtgccctattctgaggtacaggagccgcggctttctgatgggggaaaatgccgccttaggctggagccaacatgactgtcctttaaactccagtggctggccaggcacggtggctcacgcctgtaatcccaacactttgggaggccgaggcaggtggatcacctgaggtcagaagttcgagaccagcctggccaacatggggaaaccctgtctttactaaaaatataaaaattagctgggtgtggtggcgggcacctgtaatcccagctactcgggaggctgtggcaggagaatcgcttgaacccaggaggtggaggttgcagtgagccaagatcacaccantgcactccagcctgggcgacagagtctccatctggggnaaaaaaattaaataaataaactcccgtgacttngcaaaaaaaaaaaaaaagggcggccgcctccctanantgagtcgtattaanccttaattancctgaaccttggaacccngttngaaaaatccagtaaatgacctcnaaaactccatctnggatttgttccaaaaacccctcggtttgccccccggggcgtttttttnttgggaanaaanccaaacttanctttgnncaaaattttcnggaacctanggaanccttaaatggnaaaaaaaaatccccgggatnnnccccccnttgaananttcccaanggntnccntaaaaaaaattttntaagnnttttcnnnccattncncaannnncccaaaaccnanccgttncnccnggaaatatnnnncntttttaaaacccnnaaaaaaaaataacccncntttttntcncnnnctttttttcnnttttttcccccccnnnnaaaagtccccccnanattntntagnnannaaaaannnnaannngnnaaanaaaaanntncccnctttanccctttntnaaa

SEQ ID NO: 161 - DNA, 1422 bp, Homo Sapiens
  misc_feature (936)..(936): n is a, c, g, or t
  misc_feature (938)..(938): n is a, c, g, or t
  misc_feature (952)..(952): n is a, c, g, or t
  misc_feature (989)..(989): n is a, c, g, or t
  misc_feature (1005)..(1005): n is a, c, g, or t
  misc_feature (1030)..(1030): n is a, c, g, or t
  misc_feature (1046)..(1046): n is a, c, g, or t
  misc_feature (1048)..(1048): n is a, c, g, or t
  misc_feature (1053)..(1053): n is a, c, g, or t
  misc_feature (1055)..(1055): n is a, c, g, or t
  misc_feature (1070)..(1070): n is a, c, g, or t
  misc_feature (1083)..(1083): n is a, c, g, or t
  misc_feature (1091)..(1091): n is a, c, g, or t
  misc_feature (1128)..(1129): n is a, c, g, or t
  misc_feature (1151)..(1151): n is a, c, g, or t
  misc_feature (1157)..(1159): n is a, c, g, or t
  misc_feature (1165)..(1165): n is a, c, g, or t
  misc_feature (1169)..(1170): n is a, c, g, or t
  misc_feature (1172)..(1172): n is a, c, g, or t
  misc_feature (1180)..(1181): n is a, c, g, or t
  misc_feature (1200)..(1200): n is a, c, g, or t
  misc_feature (1211)..(1212): n is a, c, g, or t
  misc_feature (1217)..(1217): n is a, c, g, or t
  misc_feature (1225)..(1225): n is a, c, g, or t
  misc_feature (1227)..(1227): n is a, c, g, or t
  misc_feature (1241)..(1241): n is a, c, g, or t
  misc_feature (1257)..(1257): n is a, c, g, or t
  misc_feature (1269)..(1269): n is a, c, g, or t
  misc_feature (1279)..(1280): n is a, c, g, or t
  misc_feature (1287)..(1288): n is a, c, g, or t
  misc_feature (1291)..(1291): n is a, c, g, or t
  misc_feature (1300)..(1302): n is a, c, g, or t
  misc_feature (1314)..(1314): n is a, c, g, or t
  misc_feature (1316)..(1320): n is a, c, g, or t
  misc_feature (1327)..(1327): n is a, c, g, or t
  misc_feature (1339)..(1339): n is a, c, g, or t
  misc_feature (1344)..(1344): n is a, c, g, or t
  misc_feature (1346)..(1346): n is a, c, g, or t
  misc_feature (1350)..(1350): n is a, c, g, or t
  misc_feature (1352)..(1353): n is a, c, g, or t
  misc_feature (1355)..(1357): n is a, c, g, or t
  misc_feature (1360)..(1361): n is a, c, g, or t
  misc_feature (1367)..(1368): n is a, c, g, or t
  misc_feature (1376)..(1376): n is a, c, g, or t
  misc_feature (1382)..(1382): n is a, c, g, or t
  misc_feature (1386)..(1386): n is a, c, g, or t
  misc_feature (1391)..(1391): n is a, c, g, or t
  misc_feature (1393)..(1393): n is a, c, g, or t
  misc_feature (1414)..(1414): n is a, c, g, or t
  misc_feature (1418)..(1419): n is a, c, g, or t
  misc_feature (1422)..(1422): n is a, c, g, or t
tagagaaattactatgagaggatcgcatcaccatcaccatcacggatcctatttaggtgacactatagaatcgtcgacccacgcgtccggcagcatggcggcgggggcggctgaggcagctgtagcggccgtggaggaggtcggctcagccgggcagtttgaggagctgctgcgcctcaaagccaagtccctccttgtggtccatttctgggcaccatgggctccacagtgtgcacagatgaacgaagttatggcagagttagctaaagaactccctcaagtttcatttgtgaagttggaagctgaaggtgttcctgaagtatctgaaaaatatgaaattagctctgttcccacttttctgtttttcaagaattctcagaaaatcgaccgattagatggtgcacatgccccagagttgaccaaaaaagttcagcgacatgcatctagtggctccttcctacccagcgctaatgaacatcttaaagaagatctcaaccttcgcttgaagaaattgactcatgctgccccctgcatgctgtttatgaaaggaactcctcaagaaccacgctgtggtttcagcaagcagatggtggaaattcttcacaaacataatattcagtttagcagttttgatatcttctcagatgaagaggttcgacagggactcaaagcctattccagttggcctacctatcctcagctctatgtttctggagagctcataggaggacttgatataattaaggagctagaagcatctgaagaactagatacaatttgtcccaaagctcccaaattagaggaaaggctcaaagtgctgacaaataaaagcttctgtgatgctctttatgaaaggaaacaaacaggaagcaaaatgtggattcagcaaacaaattctggaaatactaatagtactggggttgaatatgaaacatncnatatattggaggangaaaaaattcggcaaggattaaagcttactcaaaatnggccaacatacccccnacctgtatgtgaaaggggaactggnggaggattggaaattngngaagnanctgaaaaaaaatggngaattgctgcctntactgganagaaaaaaataaaaaatcttaaacttggggcccactnntggaaaaaaattttattacttngggacnnnttctgnattnntnccccaaannggactaagaaaaaaaaatncccgccttccnnaaaangtttgggnanttccaaggccggcnaaaaaaaggaggtaanttttttcccccnaaaaaaaggnnaaaactnntcnttttttccnnnaaaaaaaaaaanannnnnaaaaaanggggcccccccnagggncnaaancnnannnaanngcccgnnaaacaaancccaancccnttttnancccggcccggtttttgaaaancaannaan

SEQ ID NO: 162 - DNA, 256 bp, Homo Sapiens
  misc_feature (2)..(2): n is a, c, g, or t
  misc_feature (4)..(5): n is a, c, g, or t
  misc_feature (11)..(14): n is a, c, g, or t
  misc_feature (17)..(17): n is a, c, g, or t
  misc_feature (19)..(21): n is a, c, g, or t
  misc_feature (30)..(31): n is a, c, g, or t
  misc_feature (34)..(34): n is a, c, g, or t
  misc_feature (38)..(38): n is a, c, g, or t
  misc_feature (40)..(42): n is a, c, g, or t
  misc_feature (44)..(44): n is a, c, g, or t
  misc_feature (46)..(46): n is a, c, g, or t
  misc_feature (49)..(49): n is a, c, g, or t
  misc_feature (51)..(51): n is a, c, g, or t
  misc_feature (54)..(54): n is a, c, g, or t
  misc_feature (58)..(58): n is a, c, g, or t
  misc_feature (67)..(67): n is a, c, g, or t
  misc_feature (69)..(70): n is a, c, g, or t
  misc_feature (74)..(74): n is a, c, g, or t
  misc_feature (79)..(80): n is a, c, g, or t
  misc_feature (86)..(86): n is a, c, g, or t
  misc_feature (89)..(89): n is a, c, g, or t
  misc_feature (99)..(100): n is a, c, g, or t
  misc_feature (106)..(106): n is a, c, g, or t
  misc_feature (111)..(111): n is a, c, g, or t
  misc_feature (117)..(117): n is a, c, g, or t
  misc_feature (120)..(120): n is a, c, g, or t
  misc_feature (123)..(123): n is a, c, g, or t
  misc_feature (130)..(130): n is a, c, g, or t
  misc_feature (133)..(134): n is a, c, g, or t
  misc_feature (136)..(136): n is a, c, g, or t
  misc_feature (143)..(144): n is a, c, g, or t
  misc_feature (149)..(149): n is a, c, g, or t
  misc_feature (154)..(154): n is a, c, g, or t
  misc_feature (165)..(165): n is a, c, g, or t
  misc_feature (169)..(169): n is a, c, g, or t
  misc_feature (172)..(175): n is a, c, g, or t
  misc_feature (178)..(178): n is a, c, g, or t
  misc_feature (181)..(182): n is a, c, g, or t
  misc_feature (191)..(193): n is a, c, g, or t
  misc_feature (197)..(198): n is a, c, g, or t
  misc_feature (210)..(212): n is a, c, g, or t
  misc_feature (217)..(217): n is a, c, g, or t
  misc_feature (220)..(220): n is a, c, g, or t
  misc_feature (223)..(223): n is a, c, g, or t
  misc_feature (225)..(225): n is a, c, g, or t
  misc_feature (236)..(236): n is a, c, g, or t
  misc_feature (250)..(251): n is a, c, g, or t
  misc_feature (253)..(253): n is a, c, g, or t
gncnntctttnnnnatnannncccgccccnnaanttanannngnanatnanttngggnggggggccngnncctnccctnnccaccnatncgcgtgagcnntttttnttttnaggggngcncanataatanaanngncgattcnnacccncaacngcgctctcgtnatgntgnnnnacnagnncagagcctnnngtcnnctcttattgtannngtccnctncancngcgtagcccantctatttcggactnnancaa

SEQ ID NO: 163 - DNA, 1316 bp, Homo Sapiens
  misc_feature (4)..(4): n is a, c, g, or t
  misc_feature (721)..(721): n is a, c, g, or t
  misc_feature (759)..(759): n is a, c, g, or t
  misc_feature (766)..(766): n is a, c, g, or t
  misc_feature (777)..(777): n is a, c, g, or t
  misc_feature (783)..(783): n is a, c, g, or t
  misc_feature (797)..(797): n is a, c, g, or t
  misc_feature (808)..(808): n is a, c, g, or t
  misc_feature (822)..(822): n is a, c, g, or t
  misc_feature (855)..(855): n is a, c, g, or t
  misc_feature (889)..(889): n is a, c, g, or t
  misc_feature (893)..(893): n is a, c, g, or t
  misc_feature (897)..(897): n is a, c, g, or t
  misc_feature (914)..(914): n is a, c, g, or t
  misc_feature (929)..(929): n is a, c, g, or t
  misc_feature (931)..(932): n is a, c, g, or t
  misc_feature (934)..(934): n is a, c, g, or t
  misc_feature (936)..(936): n is a, c, g, or t
  misc_feature (938)..(944): n is a, c, g, or t
  misc_feature (946)..(963): n is a, c, g, or t
  misc_feature (965)..(971): n is a, c, g, or t
  misc_feature (973)..(993): n is a, c, g, or t
  misc_feature (1000)..(1001): n is a, c, g, or t
  misc_feature (1003)..(1003): n is a, c, g, or t
  misc_feature (1005)..(1005): n is a, c, g, or t
  misc_feature (1013)..(1014): n is a, c, g, or t
  misc_feature (1018)..(1018): n is a, c, g, or t
  misc_feature (1020)..(1021): n is a, c, g, or t
  misc_feature (1023)..(1023): n is a, c, g, or t
  misc_feature (1028)..(1028): n is a, c, g, or t
  misc_feature (1030)..(1030): n is a, c, g, or t
  misc_feature (1034)..(1035): n is a, c, g, or t
  misc_feature (1040)..(1041): n is a, c, g, or t
  misc_feature (1044)..(1044): n is a, c, g, or t
  misc_feature (1047)..(1047): n is a, c, g, or t
  misc_feature (1052)..(1053): n is a, c, g, or t
  misc_feature (1056)..(1058): n is a, c, g, or t
  misc_feature (1065)..(1065): n is a, c, g, or t
  misc_feature (1068)..(1068): n is a, c, g, or t
  misc_feature (1070)..(1070): n is a, c, g, or t
  misc_feature (1072)..(1073): n is a, c, g, or t
  misc_feature (1079)..(1079): n is a, c, g, or t
  misc_feature (1083)..(1084): n is a, c, g, or t
  misc_feature (1090)..(1090): n is a, c, g, or t
  misc_feature (1097)..(1098): n is a, c, g, or t
  misc_feature (1114)..(1114): n is a, c, g, or t
  misc_feature (1117)..(1117): n is a, c, g, or t
  misc_feature (1122)..(1122): n is a, c, g, or t
  misc_feature (1127)..(1127): n is a, c, g, or t
  misc_feature (1132)..(1132): n is a, c, g, or t
  misc_feature (1145)..(1145): n is a, c, g, or t
  misc_feature (1147)..(1147): n is a, c, g, or t
  misc_feature (1155)..(1155): n is a, c, g, or t
  misc_feature (1157)..(1157): n is a, c, g, or t
  misc_feature (1160)..(1161): n is a, c, g, or t
  misc_feature (1165)..(1165): n is a, c, g, or t
  misc_feature (1170)..(1171): n is a, c, g, or t
  misc_feature (1179)..(1179): n is a, c, g, or t
  misc_feature (1183)..(1184): n is a, c, g, or t
  misc_feature (1188)..(1188): n is a, c, g, or t
  misc_feature (1191)..(1194): n is a, c, g, or t
  misc_feature (1198)..(1199): n is a, c, g, or t
  misc_feature (1213)..(1213): n is a, c, g, or t
  misc_feature (1216)..(1216): n is a, c, g, or t
  misc_feature (1221)..(1221): n is a, c, g, or t
  misc_feature (1223)..(1223): n is a, c, g, or t
  misc_feature (1226)..(1226): n is a, c, g, or t
  misc_feature (1236)..(1236): n is a, c, g, or t
  misc_feature (1238)..(1238): n is a, c, g, or t
  misc_feature (1243)..(1243): n is a, c, g, or t
  misc_feature (1246)..(1246): n is a, c, g, or t
  misc_feature (1248)..(1248): n is a, c, g, or t
  misc_feature (1251)..(1252): n is a, c, g, or t
  misc_feature (1254)..(1254): n is a, c, g, or t
  misc_feature (1256)..(1256): n is a, c, g, or t
  misc_feature (1273)..(1273): n is a, c, g, or t
  misc_feature (1279)..(1284): n is a, c, g, or t
  misc_feature (1286)..(1286): n is a, c, g, or t
  misc_feature (1288)..(1288): n is a, c, g, or t
  misc_feature (1290)..(1290): n is a, c, g, or t
  misc_feature (1292)..(1299): n is a, c, g, or t
  misc_feature (1305)..(1305): n is a, c, g, or t
  misc_feature (1309)..(1309): n is a, c, g, or t
  misc_feature (1316)..(1316): n is a, c, g, or t
attngagaaattactatgagaggatcgcatcaccatcaccatcacggatcctatttaggtgacactatagaatcgtcgacccacgcgtccgcccaggccccagcccagcaggacctgcaggggacgagccagccgagagcccatcggagaccccaggcccccgcccagcaggacctgcaggggacgagccagccgagagcccatcggagaccccaggcccccgcccggcaggacctgcaggggacgagccagccgagagcccatcggagaccccaggccccagcccggcaggacctacaagggatgagccagccgagagcccatcggagaccccaggcccccgcccggcaggacctgcaggggacgagccagccgagagcccatcggagaccccaggcccccgcccggcaggacctgcaggggacgagccagccgagagcccatcggagaccccaggccccagcccggcaggacctacaagggatgagccagccaaggcgggggaggcagcagagttgcaggacgcagaggtggagtcttctgccaagtctgggaagccttaaggaaaggagtgcccgtcggcgtcttggtcctcctgtccctgctgcaggggctggggcctccggagctgctgcgggctcccctcaggctctgcttcgtgacccgtgacccatgacccacagtgctggcctcctgtggggccactatagcagcccaccanaaagccgcgaggccctcagggaagcccaaggcctgcanaagcctncctggcctggntgtgtntttccccacccagnttttcccctgngccccttgtttttnttaattgaccctttttggaatgggggggcggcnggcaaggctgctttttctttattctgataccaancaanggcntttttttgaataaattntttttgactttttgnannananannnnnnnannnnnnnnnnnnnnnnnntnnnnnnntnnnnnnnnnnnnnnnnnnnnnggggggnncncntcccttanngggngnncntattnancttnnttttnnttnaanttggnntcnnntttttanaantncnntaatgncttnnaaaatncttttgnnttttttttaaaaaccnttnttttnccccnggggntttttttttttgngnaaaattcnanctnntttntgggnnattttttngggnntttnggnnnntttnnatgggaaaaaaaanttntgggntnttncccccctttntnttttnccngnggnntntnaaaaaattttttggggntttttnnnnnntntncnannnnnnnnaaaaanaaanttttttn

SEQ ID NO: 164 - DNA, 256 bp, Homo Sapiens
  misc_feature (7)..(7): n is a, c, g, or t
tagaggnaaattactatgagaggatcgcatcaccatcaccatcacggatcctatttaggtgacactatagaatcgtcgacccacgcgtccgagaaagtgtacgacccaaagaatgaggaggacgacatgcgggagatggaggaggagcgactgcgcatgcgggagcatgtgatgaagaatgtggacaccaaccaggaccgcctcgtgaccctggaggagttcctcgcatccactcagaggaaggagtttggggaca

SEQ ID NO: 165 - DNA, 256 bp, Homo Sapiens
ttactatgagaggatcgcatcaccatcaccatcacggatcctatttaggtgacactatagaatcgtcgacccacgcgtccgccaagaatgccaggaatgatttcctgaaagaggtgaagatcatgtcgaggctcaaggaccccaacatcattcggctgctgggcgtgtgtgtgcaggacgaccccctctgcatgattactgactacatggagaacggcgacctcaaccagttcctcagtgcccaccagctggagga

SEQ ID NO: 166 - DNA, 256 bp, Homo Sapiens
  misc_feature (5)..(5): n is a, c, g, or t
agagnaaattaactatgagaggatcgcatcaccatcaccatcacggatcctatttaggtgacactatagaatcgtcgacccacgcgtccgcgtcgccgccatcctcggcgcgactcgcttctttcggttctacctgggagaatccaccgccatccgccaccatggtgaacttcacggtagaccagatccgcgccatcatggacaagaaggccaacatccgcaacatgtctgtcatcgcccacgtggaccatggcaa

SEQ ID NO: 167 - DNA, 256 bp, Homo Sapiens
tgcagagcacagtcacaggccacgtagaacgtgcccttgagactcggcacgagcaggaacagcggcggctggagcgagcactggctgaggggcagcagcggggagggcagctgcaggagcagctgacacaacagttgtcccaagcactgtcgtcagctgtagctgggcggctagagcgcagcatacgggatgagatcaagaagacagtccctccatgtgtctcaaggagtctggagcctatggcaggccaactgag

SEQ ID NO: 168 - DNA, 1349 bp, Homo Sapiens
  misc_feature (1)..(1): n is a, c, g, or t
  misc_feature (804)..(804): n is a, c, g, or t
  misc_feature (899)..(899): n is a, c, g, or t
  misc_feature (906)..(906): n is a, c, g, or t
  misc_feature (918)..(918): n is a, c, g, or t
  misc_feature (923)..(923): n is a, c, g, or t
  misc_feature (927)..(927): n is a, c, g, or t
  misc_feature (935)..(935): n is a, c, g, or t
  misc_feature (937)..(938): n is a, c, g, or t
  misc_feature (946)..(946): n is a, c, g, or t
  misc_feature (950)..(950): n is a, c, g, or t
  misc_feature (960)..(960): n is a, c, g, or t
  misc_feature (965)..(965): n is a, c, g, or t
  misc_feature (972)..(973): n is a, c, g, or t
  misc_feature (976)..(976): n is a, c, g, or t
  misc_feature (999)..(999): n is a, c, g, or t
  misc_feature (1002)..(1002): n is a, c, g, or t
  misc_feature (1007)..(1007): n is a, c, g, or t
  misc_feature (1009)..(1009): n is a, c, g, or t
  misc_feature (1013)..(1014): n is a, c, g, or t
  misc_feature (1016)..(1016): n is a, c, g, or t
  misc_feature (1024)..(1024): n is a, c, g, or t
  misc_feature (1026)..(1026): n is a, c, g, or t
  misc_feature (1028)..(1028): n is a, c, g, or t
  misc_feature (1031)..(1031): n is a, c, g, or t
  misc_feature (1038)..(1038): n is a, c, g, or t
  misc_feature (1047)..(1047): n is a, c, g, or t
  misc_feature (1050)..(1050): n is a, c, g, or t
  misc_feature (1059)..(1059): n is a, c, g, or t
  misc_feature (1062)..(1062): n is a, c, g, or t
  misc_feature (1064)..(1064): n is a, c, g, or t
  misc_feature (1066)..(1068): n is a, c, g, or t
  misc_feature (1081)..(1081): n is a, c, g, or t
  misc_feature (1083)..(1085): n is a, c, g, or t
  misc_feature (1108)..(1109): n is a, c, g, or t
  misc_feature (1119)..(1120): n is a, c, g, or t
  misc_feature (1122)..(1123): n is a, c, g, or t
  misc_feature (1127)..(1127): n is a, c, g, or t
  misc_feature (1131)..(1133): n is a, c, g, or t
  misc_feature (1139)..(1139): n is a, c, g, or t
  misc_feature (1151)..(1151): n is a, c, g, or t
  misc_feature (1157)..(1157): n is a, c, g, or t
  misc_feature (1160)..(1160): n is a, c, g, or t
  misc_feature (1169)..(1169): n is a, c, g, or t
  misc_feature (1171)..(1171): n is a, c, g, or t
  misc_feature (1175)..(1175): n is a, c, g, or t
  misc_feature (1178)..(1178): n is a, c, g, or t
  misc_feature (1182)..(1184): n is a, c, g, or t
  misc_feature (1186)..(1193): n is a, c, g, or t
  misc_feature (1196)..(1197): n is a, c, g, or t
  misc_feature (1199)..(1200): n is a, c, g, or t
  misc_feature (1203)..(1204): n is a, c, g, or t
  misc_feature (1206)..(1207): n is a, c, g, or t
  misc_feature (1212)..(1213): n is a, c, g, or t
  misc_feature (1225)..(1226): n is a, c, g, or t
  misc_feature (1228)..(1228): n is a, c, g, or t
  misc_feature (1234)..(1234): n is a, c, g, or t
  misc_feature (1237)..(1238): n is a, c, g, or t
  misc_feature (1242)..(1242): n is a, c, g, or t
  misc_feature (1244)..(1245): n is a, c, g, or t
  misc_feature (1247)..(1247): n is a, c, g, or t
  misc_feature (1249)..(1250): n is a, c, g, or t
  misc_feature (1254)..(1269): n is a, c, g, or t
  misc_feature (1274)..(1277): n is a, c, g, or t
  misc_feature (1279)..(1282): n is a, c, g, or t
  misc_feature (1289)..(1294): n is a, c, g, or t
  misc_feature (1302)..(1303): n is a, c, g, or t
  misc_feature (1305)..(1306): n is a, c, g, or t
  misc_feature (1310)..(1311): n is a, c, g, or t
  misc_feature (1313)..(1321): n is a, c, g, or t
  misc_feature (1326)..(1331): n is a, c, g, or t
  misc_feature (1334)..(1336): n is a, c, g, or t
  misc_feature (1338)..(1349): n is a, c, g, or t
naaatagagaaattactatgagaggatcgcatcaccatcaccatcacggatcctatttaggtgacactatagaatcgtcgacccacgcgtccggtgaagcagagcttcctgaccgaggtggagcagctgtccaggtttcgtcacccaaacattgtggactttgctggctactgtgctcagaacggcttctactgcctggtgtacggcttcctgcccaacggctccctggaggaccgtctccactgccagacccaggcctgcccacctctctcctggcctcagcgactggacatccttctgggtacagcccgggcaattcagtttctacatcaggacagccccagcctcatccatggagacatcaagagttccaacgtccttctggatgagaggctgacacccaagctgggagactttggcctggcccggttcagccgctttgccgggtccagccccagccagagcagcatggtggcccggacacagacagtgcggggcaccctggcctacctgcccgaggagtacatcaagacgggaaggctggctgtggacacggacaccttcagctttggggtggtagtgctagagaccttggctggtcagagggctgtgaagacgcacggtgccaggaccaagtatctgaaagacctggtggaagaggaggctgaggaggctggagtggctttgagaagcacccagagcacactgcaagcaggtctggctgcagatgcctgggctgctcccatcgccatgcagatctacaagaagcacctggaccccaggcccgggccctgcccacctganctgggcctgggcctgggccactggcctgctgctgcctgcaccgccgggccaaaaggaggcctcctatgacccaaggaaaactcctacgtgtccancactggnaaaacccacagnggggntgcntccatggnanncccctggnaacnccatcagganccagngcccaannaancaaaaaactgcaaaaagccccancancccgngnaaannanaaaaaccnangnggnctcttgntggcctggnctntggaaattnaancnannntgcctctgggacnannncccttaaggaagccggtttcccnnggggaaaacnnannaaanccannngggaanggcccaaaaccnccccanccnggaaaaaangncttngantttnnntnnnnnnnnaanncnnaannanntaccnncccaaaaaaaanncnaaaatnccnnaaananngncnnaaannnnnnnnnnnnnnnnccccnnnntnnnnaaaaaannnnnncaaaaaannannaaannannnnnnnnnacccnnnnnnaannntnnnnnnnnnnnn

SEQ ID NO: 169 - DNA, 1342 bp, Homo Sapiens
  misc_feature (808)..(808): n is a, c, g, or t
  misc_feature (823)..(823): n is a, c, g, or t
  misc_feature (859)..(859): n is a, c, g, or t
  misc_feature (861)..(861): n is a, c, g, or t
  misc_feature (866)..(866): n is a, c, g, or t
  misc_feature (879)..(879): n is a, c, g, or t
  misc_feature (887)..(887): n is a, c, g, or t
  misc_feature (897)..(897): n is a, c, g, or t
  misc_feature (918)..(918): n is a, c, g, or t
  misc_feature (947)..(947): n is a, c, g, or t
  misc_feature (952)..(952): n is a, c, g, or t
  misc_feature (969)..(969): n is a, c, g, or t
  misc_feature (974)..(974): n is a, c, g, or t
  misc_feature (981)..(981): n is a, c, g, or t
  misc_feature (991)..(991): n is a, c, g, or t
  misc_feature (997)..(997): n is a, c, g, or t
  misc_feature (1014)..(1014): n is a, c, g, or t
  misc_feature (1017)..(1018): n is a, c, g, or t
  misc_feature (1022)..(1022): n is a, c, g, or t
  misc_feature (1034)..(1034): n is a, c, g, or t
  misc_feature (1049)..(1050): n is a, c, g, or t
  misc_feature (1054)..(1054): n is a, c, g, or t
  misc_feature (1057)..(1057): n is a, c, g, or t
  misc_feature (1059)..(1059): n is a, c, g, or t
  misc_feature (1065)..(1065): n is a, c, g, or t
  misc_feature (1074)..(1074): n is a, c, g, or t
  misc_feature (1081)..(1083): n is a, c, g, or t
  misc_feature (1088)..(1089): n is a, c, g, or t
  misc_feature (1096)..(1096): n is a, c, g, or t
  misc_feature (1104)..(1105): n is a, c, g, or t
  misc_feature (1108)..(1108): n is a, c, g, or t
  misc_feature (1112)..(1112): n is a, c, g, or t
  misc_feature (1124)..(1124): n is a, c, g, or t
  misc_feature (1132)..(1132): n is a, c, g, or t
  misc_feature (1136)..(1136): n is a, c, g, or t
  misc_feature (1146)..(1147): n is a, c, g, or t
  misc_feature (1149)..(1149): n is a, c, g, or t
  misc_feature (1151)..(1152): n is a, c, g, or t
  misc_feature (1159)..(1159): n is a, c, g, or t
  misc_feature (1161)..(1161): n is a, c, g, or t
  misc_feature (1165)..(1166): n is a, c, g, or t
  misc_feature (1169)..(1169): n is a, c, g, or t
  misc_feature (1172)..(1172): n is a, c, g, or t
  misc_feature (1192)..(1192): n is a, c, g, or t
  misc_feature (1195)..(1198): n is a, c, g, or t
  misc_feature (1200)..(1201): n is a, c, g, or t
  misc_feature (1208)..(1208): n is a, c, g, or t
  misc_feature (1218)..(1218): n is a, c, g, or t
  misc_feature (1220)..(1223): n is a, c, g, or t
  misc_feature (1225)..(1229): n is a, c, g, or t
  misc_feature (1231)..(1235): n is a, c, g, or t
  misc_feature (1239)..(1244): n is a, c, g, or t
  misc_feature (1247)..(1248): n is a, c, g, or t
  misc_feature (1251)..(1251): n is a, c, g, or t
  misc_feature (1256)..(1259): n is a, c, g, or t
  misc_feature (1263)..(1263): n is a, c, g, or t
  misc_feature (1265)..(1265): n is a, c, g, or t
  misc_feature (1271)..(1271): n is a, c, g, or t
  misc_feature (1273)..(1274): n is a, c, g, or t
  misc_feature (1277)..(1278): n is a, c, g, or t
  misc_feature (1288)..(1292): n is a, c, g, or t
  misc_feature (1296)..(1299): n is a, c, g, or t
  misc_feature (1301)..(1320): n is a, c, g, or t
  misc_feature (1325)..(1328): n is a, c, g, or t
  misc_feature (1333)..(1342): n is a, c, g, or t
tagagaaattactatgagaggatcgcatcaccatcaccatcacggatcctatttaggtgacactatagaatcgtcgacccacgcgtccgggaccaggcagccactttcctggtgctctctgggcccagctggtgctgtagggccacgcaggcaggggcgtcaaggggtttctctgcccaaggaagacagaacatggagaaccgtcagggcaggaaccccacagactgtcccttccagcccacactctgccacctcctggccctgtcccaattctgagccaaggcctccccgaggcagaagttgcctggtcctctgtccccacagtgacctgactgggggtgagggagaaggaggagagagcccatgtgtggtgtgtgtgcccctgagaacttcgtggtgactgcctttgggagcccgcaggtggccagaggcaggggtagctgagttcctggagaccccttttttgcccccaggttccccagagggcaacgccatcagtagcagtgtggtgtttcaggcagagctctggccaggctgtgccagtgtgtcccggacgcatcactaaggaagagagagtttatttagtcaactggcccaaggcagcgaggcttctacagtcccacaccccatagccgcctgggctggggcttactgggggctgaaggttctggacatgaacaagggtcaggtagaagagaaaggcttcccctacaccccagcctcctgctgtcccctgaagcccaggactgcgttgtatgctttccatccactcaccttaccccatagcatcttgcggcccaaaaaccanagccatttgtctcanaccctaaatcaataatcacaaaccccaaaacgggananagcantgaaaacatgcanggctgtgnacgggggaanggttgtggcgggtgttctgangctgaaaagacacctatatgcgtatttcntctanacacatcaccccccttntatantcttaanccatgactancctggnggcgtgtaaatttctgnccnntttnaccccctcatgngcttcttctgaaaanngaangtnantgtttnaaaactggnaaaattnnnccccnnttattgnaaaaaaanntgnaaancttggaaatttntttttttnctgntttccaaagnntncnnaaaaaancnaaannttnaangggggggggggggggggggnaannnngnnccccccngggggggggntnnnngnnnnntnnnnntttnnnnnnggnnaanttttnnnntttntntttttntnnccnnaaaaaaaaannnnntttnnnntnnnnnnnnnnnnnnnnnnnnaaaannnnaaaannnnnnnnnn

SEQ ID NO: 170 - DNA, 1203 bp, Homo Sapiens
  misc_feature (1)..(1): n is a, c, g, or t
  misc_feature (952)..(952): n is a, c, g, or t
  misc_feature (961)..(1075): n is a, c, g, or t
  misc_feature (1078)..(1091): n is a, c, g, or t
  misc_feature (1093)..(1101): n is a, c, g, or t
  misc_feature (1103)..(1110): n is a, c, g, or t
  misc_feature (1112)..(1116): n is a, c, g, or t
  misc_feature (1120)..(1126): n is a, c, g, or t
  misc_feature (1129)..(1135): n is a, c, g, or t
  misc_feature (1137)..(1145): n is a, c, g, or t
  misc_feature (1147)..(1148): n is a, c, g, or t
  misc_feature (1155)..(1155): n is a, c, g, or t
  misc_feature (1158)..(1167): n is a, c, g, or t
  misc_feature (1169)..(1170): n is a, c, g, or t
  misc_feature (1173)..(1183): n is a, c, g, or t
  misc_feature (1185)..(1186): n is a, c, g, or t
  misc_feature (1188)..(1188): n is a, c, g, or t
  misc_feature (1193)..(1193): n is a, c, g, or t
nattagagaaattactatgagaggatcgcatcaccatcaccatcacggatcctatttaggtgacactatagaatcgtcgacccacgcgtccgagatgccgaaaggaaagaaggccaagggaaagaaggtggctccggccccagctgtcgtgaagaagcaggaggctaagaaagtggtgaatcccctgtttgagaaaaggcctaagaattttggcattggacaggacatccagcccaaaagagacctcacccgctttgtgaaatggccccgctatatcaggttgcagcggcagagagccatcctctataagcggctgaaagtgcctcctgcgattaaccagttcacccaggccctggaccgccaaacagctactcagctgcttaagctggcccacaagtacagaccagagacaaagcaagagaagaagcagagactgttggcccgggccgagaagaaggctgctggcaaaggggacgtcccaacgaagagaccacctgtccttcgagcaggagttaacaccgtcaccaccttggtggagaacaagaaagctcagctggtggtgattgcacacgacgtggatcccatcgagctggttgtcttcttgcctgccctgtgtcgtaaaatgggggtcccttactgcattatcaagggaaaggcaagactgggacgtctagtccacaggaagacctgcaccactgtcgccttcacacaggtgaactcggaagacaaaggcgctttggctaagctggtggaagctatcaggaccaattacaatgacagatacgatgagatccgccgtcactggggtggcaatgtcctgggtcctaagtctgtggctcgtatcgccaagctcgaaaaggcaaaggctaaagaacttgccactaaactgggttaaatgtacactgttgagttttctgtacataaaaataattgaaataatacaaatttttcnttcaaaaannnnnnnnnnnnnnnnnnnnnnnnnnnnnnnnnnnnnnnnnnnnnnnnnnnnnnnnnnnnnnnnnnnnnnnnnnnnnnnnnnnnnnnnnnnnnnnnnnnnnnnnnnnnnnnnnnnttnnnnnnnnnnnnnncnnnnnnnnntnnnnnnnntnnnnncccnnnnnnnttnnnnnnntnnnnnnnnngnnttttttngtnnnnnnnnnntnnggnnnnnnnnnnntnnanaaatntaaaaaaaaa

SEQ ID NO: 171 - DNA, 256 bp, Homo Sapiens
  misc_feature (1)..(1): n is a, c, g, or t
ntcctatgagaggatcgcatcaccatcaccatcacggatcctatttaggtgacactatagaatcgtcgacccacgcgtccgcccacgcgtccggcaagatggcggccaccagtggaactgatgagccggtttccggggagttggtgtctgtggcacatgcgctttctctcccagcagagtcgtatggcaacgatcctgacattgagatggcttgggccatgagagcaatgcagcatgctgaagtctattacaagct

SEQ ID NO: 172 - DNA, 1400 bp, Homo Sapiens
  misc_feature (873)..(873): n is a, c, g, or t
  misc_feature (920)..(920): n is a, c, g, or t
  misc_feature (927)..(927): n is a, c, g, or t
  misc_feature (933)..(933): n is a, c, g, or t
  misc_feature (936)..(936): n is a, c, g, or t
  misc_feature (965)..(965): n is a, c, g, or t
  misc_feature (991)..(991): n is a, c, g, or t
  misc_feature (993)..(993): n is a, c, g, or t
  misc_feature (1001)..(1001): n is a, c, g, or t
  misc_feature (1004)..(1004): n is a, c, g, or t
  misc_feature (1012)..(1012): n is a, c, g, or t
  misc_feature (1027)..(1027): n is a, c, g, or t
  misc_feature (1042)..(1042): n is a, c, g, or t
  misc_feature (1044)..(1044): n is a, c, g, or t
  misc_feature (1053)..(1053): n is a, c, g, or t
  misc_feature (1055)..(1055): n is a, c, g, or t
  misc_feature (1059)..(1059): n is a, c, g, or t
  misc_feature (1068)..(1068): n is a, c, g, or t
  misc_feature (1077)..(1077): n is a, c, g, or t
  misc_feature (1092)..(1092): n is a, c, g, or t
  misc_feature (1111)..(1111): n is a, c, g, or t
  misc_feature (1116)..(1116): n is a, c, g, or t
  misc_feature (1122)..(1122): n is a, c, g, or t
  misc_feature (1128)..(1128): n is a, c, g, or t
  misc_feature (1130)..(1130): n is a, c, g, or t
  misc_feature (1132)..(1132): n is a, c, g, or t
  misc_feature (1139)..(1139): n is a, c, g, or t
  misc_feature (1143)..(1144): n is a, c, g, or t
  misc_feature (1149)..(1149): n is a, c, g, or t
  misc_feature (1163)..(1163): n is a, c, g, or t
  misc_feature (1206)..(1206): n is a, c, g, or t
  misc_feature (1211)..(1211): n is a, c, g, or t
  misc_feature (1214)..(1214): n is a, c, g, or t
  misc_feature (1220)..(1220): n is a, c, g, or t
  misc_feature (1223)..(1223): n is a, c, g, or t
  misc_feature (1235)..(1235): n is a, c, g, or t
  misc_feature (1249)..(1249): n is a, c, g, or t
  misc_feature (1255)..(1255): n is a, c, g, or t
  misc_feature (1263)..(1263): n is a, c, g, or t
  misc_feature (1265)..(1265): n is a, c, g, or t
  misc_feature (1269)..(1269): n is a, c, g, or t
  misc_feature (1272)..(1272): n is a, c, g, or t
  misc_feature (1276)..(1276): n is a, c, g, or t
  misc_feature (1292)..(1292): n is a, c, g, or t
  misc_feature (1309)..(1310): n is a, c, g, or t
  misc_feature (1312)..(1312): n is a, c, g, or t
  misc_feature (1316)..(1316): n is a, c, g, or t
  misc_feature (1319)..(1319): n is a, c, g, or t
  misc_feature (1325)..(1326): n is a, c, g, or t
  misc_feature (1328)..(1328): n is a, c, g, or t
  misc_feature (1330)..(1330): n is a, c, g, or t
  misc_feature (1339)..(1339): n is a, c, g, or t
  misc_feature (1343)..(1343): n is a, c, g, or t
  misc_feature (1348)..(1348): n is a, c, g, or t
  misc_feature (1352)..(1352): n is a, c, g, or t
  misc_feature (1357)..(1358): n is a, c, g, or t
  misc_feature (1360)..(1360): n is a, c, g, or t
  misc_feature (1364)..(1364): n is a, c, g, or t
  misc_feature (1372)..(1373): n is a, c, g, or t
  misc_feature (1377)..(1380): n is a, c, g, or t
  misc_feature (1388)..(1389): n is a, c, g, or t
tagagaaattaactatgaagaggatcgcatcaccatcaccatcacggatcctatttaggtgacactatagaatcgtcgacccacgcgtccgctagaaatggaggacaggcctcatcgtctcctaattatgaaggacccttacactctttgcaaagccgaattgaagatcgtttagaaagactggatgatgctattcatgttctccggaaccatgcagtgggcccatccacagctatgcctggtggtcatggggacatgcatggaatcattggaccttctcataatggagccatgggtggtctgggctcagggtatggaaccggccttctttcagccaacagacattcactcatggtggggacccatcgtgaagatggcgtggccctgagaggcagccattctcttctgccaaaccaggttccggttccacagcttcctgtccagtctgcgacttcccctgacctgaacccaccccaggacccttacagaggcatgccaccaggactacaggggcagagtgtctcctctggcagctctgagatcaaatccgatgacgagggtgatgagaacctgcaagacacgaaatcttcggaggacaagaaattagatgacgacaagaaggatatcaaatcaattactaggtcaagatctagcaataatgacgatgaggacctgacaccagagcagaaggcagagcgtgagaaggagcggaggatggccaacaatgcccgagagcgtctgcgggtccgtgacatcaacgaggctttcaaagagctcggccgcatggtgcagctccacctcaagagtgacaagccccagaccaagctcctgatcctccaccaggcggtggccgtcatcctcagtctggagcancaagtccgagaaaggaatctgaatccgaaagctgcgtgtctgaaaanaaaggangaaaanaangtgtcctcaaagcctccccctctctcctnggccggcccacaccctggaatgggananccatcgantcncatggganaaagtaaaagggtcnagttgcccattgctncntaaaaaaananaccncttcttaanaactgtatnatcttaaacccaaanaaacctttcctaaaccccnttttngtaaanaaaaanantntgaaaantttnnaatcncaaacccaaagttnccccttccccttttcaaaacgaaacaaaaaaaaaaaaaggggngcccnccnaagggngcnataacttatacnaacttgacccgggnaaaccnaaaacccnancccnggntttnaaaccggggcccgggnttttttgggaaaccccnntngganttnggccgnncnanggaaaaacnggtnccccntatnccggnncnaaanttggtttnntttnnnntaaaaccnnttaatttttaa

SEQ ID NO: 173 - DNA, 1181 bp, Homo Sapiens
  misc_feature (2)..(2): n is a, c, g, or t
  misc_feature (4)..(4): n is a, c, g, or t
  misc_feature (777)..(777): n is a, c, g, or t
  misc_feature (781)..(781): n is a, c, g, or t
  misc_feature (801)..(801): n is a, c, g, or t
  misc_feature (803)..(803): n is a, c, g, or t
  misc_feature (806)..(806): n is a, c, g, or t
  misc_feature (829)..(829): n is a, c, g, or t
  misc_feature (834)..(834): n is a, c, g, or t
  misc_feature (839)..(840): n is a, c, g, or t
  misc_feature (845)..(845): n is a, c, g, or t
  misc_feature (848)..(848): n is a, c, g, or t
  misc_feature (851)..(851): n is a, c, g, or t
  misc_feature (854)..(855): n is a, c, g, or t
  misc_feature (857)..(858): n is a, c, g, or t
  misc_feature (861)..(861): n is a, c, g, or t
  misc_feature (877)..(877): n is a, c, g, or t
  misc_feature (882)..(882): n is a, c, g, or t
  misc_feature (898)..(898): n is a, c, g, or t
  misc_feature (903)..(903): n is a, c, g, or t
  misc_feature (911)..(911): n is a, c, g, or t
  misc_feature (913)..(913): n is a, c, g, or t
  misc_feature (932)..(932): n is a, c, g, or t
  misc_feature (935)..(935): n is a, c, g, or t
  misc_feature (937)..(937): n is a, c, g, or t
  misc_feature (943)..(944): n is a, c, g, or t
  misc_feature (949)..(949): n is a, c, g, or t
  misc_feature (952)..(952): n is a, c, g, or t
  misc_feature (958)..(958): n is a, c, g, or t
  misc_feature (960)..(960): n is a, c, g, or t
  misc_feature (963)..(963): n is a, c, g, or t
  misc_feature (967)..(967): n is a, c, g, or t
  misc_feature (971)..(977): n is a, c, g, or t
  misc_feature (981)..(981): n is a, c, g, or t
  misc_feature (985)..(986): n is a, c, g, or t
  misc_feature (990)..(991): n is a, c, g, or t
  misc_feature (996)..(996): n is a, c, g, or t
  misc_feature (1001)..(1003): n is a, c, g, or t
  misc_feature (1009)..(1013): n is a, c, g, or t
  misc_feature (1018)..(1018): n is a, c, g, or t
  misc_feature (1021)..(1029): n is a, c, g, or t
  misc_feature (1031)..(1032): n is a, c, g, or t
  misc_feature (1036)..(1037): n is a, c, g, or t
  misc_feature (1039)..(1047): n is a, c, g, or t
  misc_feature (1050)..(1052): n is a, c, g, or t
  misc_feature (1057)..(1057): n is a, c, g, or t
  misc_feature (1060)..(1063): n is a, c, g, or t
  misc_feature (1065)..(1070): n is a, c, g, or t
  misc_feature (1072)..(1079): n is a, c, g, or t
  misc_feature (1081)..(1081): n is a, c, g, or t
  misc_feature (1087)..(1087): n is a, c, g, or t
  misc_feature (1090)..(1091): n is a, c, g, or t
  misc_feature (1094)..(1095): n is a, c, g, or t
  misc_feature (1099)..(1099): n is a, c, g, or t
  misc_feature (1104)..(1105): n is a, c, g, or t
  misc_feature (1107)..(1110): n is a, c, g, or t
  misc_feature (1112)..(1112): n is a, c, g, or t
  misc_feature (1114)..(1115): n is a, c, g, or t
  misc_feature (1120)..(1122): n is a, c, g, or t
  misc_feature (1124)..(1126): n is a, c, g, or t
  misc_feature (1131)..(1131): n is a, c, g, or t
  misc_feature (1133)..(1146): n is a, c, g, or t
  misc_feature (1149)..(1149): n is a, c, g, or t
  misc_feature (1151)..(1171): n is a, c, g, or t
  misc_feature (1174)..(1181): n is a, c, g, or t
anantagagaaattactatgagaggatcgcatcaccatcaccatcacggatcctatttaggtgacactatagaatcgtcgacccacgcgtccgcgtggccccggtcgcgtctgccttggagaagaagacaaagagcaaggggccctacatctgcgctctgtgcgccaaggagttcaagaacggctacaatctccggaggcacgaagccatccacacgggagccaaggccggccgggtcccctcgggtgctatgaagatgccgaccatggtgcccctgagcctcctgagcgtgccccagctgagcggagccggcgggggagggggagaggcgggtgccggcggcggcgctgccgcagtggccgccggtggcgtggtgaccacgaccgcctcggggaagcgcatccggaagaaccatgcctgcgagatgtgtggcaaggccttccgcgacgtctaccacctgaaccgacacaagctgtcgcactcggacgagaagccctaccagtgcccggtgtgccagcagcgcttcaagcgcaaggaccgcatgagctaccacgtgcgctcacatgacggcgctgtgcacaagccctacaactgctcccactgtggcaagagcttctcccggtgtgcacggggcctcggccgcccgctaggccgtggggagggagggacgcgacggaggtggcctggccgtggctggcggggagggaggcggctgctgaggctggggaaggggagccactcccagggcggagggaggaagcctctcccggttaccanggancaaggggtggtcctttgtcnangangtgggccttggggttgacggaancttcncgtgnnaagangcngcngcnncnncancgctgctgggctccanggganggatttcctgcttaantgtcnctgtgacngnctgggctccggaagaagcncangnatctcnnaaagnctntggtgngnttngtgnattnnnnnnnacanttcnnctannccaanccaannngtcccnnnnngaatnctnnnnnnnnntnnaaanntnnnnnnnnnaannnccttnaannnnannnnnntnnnnnnnncnttttcnaannatnnaaantcccnngnnnnantnnttaannntnnnccccntnnnnnnnnnnnnnnttnannnnnnnnnnnnnnnnnnnnnttnnnnnnnn

SEQ ID NO: 174 - DNA, 1200 bp, Homo Sapiens
  misc_feature (1)..(1): n is a, c, g, or t
  misc_feature (309)..(309): n is a, c, g, or t
  misc_feature (789)..(789): n is a, c, g, or t
  misc_feature (798)..(798): n is a, c, g, or t
  misc_feature (832)..(832): n is a, c, g, or t
  misc_feature (847)..(847): n is a, c, g, or t
  misc_feature (863)..(863): n is a, c, g, or t
  misc_feature (877)..(877): n is a, c, g, or t
  misc_feature (909)..(909): n is a, c, g, or t
  misc_feature (916)..(916): n is a, c, g, or t
  misc_feature (921)..(921): n is a, c, g, or t
  misc_feature (927)..(927): n is a, c, g, or t
  misc_feature (929)..(929): n is a, c, g, or t
  misc_feature (950)..(951): n is a, c, g, or t
  misc_feature (969)..(969): n is a, c, g, or t
  misc_feature (981)..(981): n is a, c, g, or t
  misc_feature (994)..(994): n is a, c, g, or t
  misc_feature (997)..(997): n is a, c, g, or t
  misc_feature (1007)..(1008): n is a, c, g, or t
  misc_feature (1021)..(1021): n is a, c, g, or t
  misc_feature (1023)..(1024): n is a, c, g, or t
  misc_feature (1028)..(1028): n is a, c, g, or t
  misc_feature (1050)..(1050): n is a, c, g, or t
  misc_feature (1052)..(1053): n is a, c, g, or t
  misc_feature (1064)..(1064): n is a, c, g, or t
  misc_feature (1066)..(1066): n is a, c, g, or t
  misc_feature (1070)..(1070): n is a, c, g, or t
  misc_feature (1072)..(1072): n is a, c, g, or t
  misc_feature (1076)..(1076): n is a, c, g, or t
  misc_feature (1084)..(1084): n is a, c, g, or t
  misc_feature (1090)..(1090): n is a, c, g, or t
  misc_feature (1093)..(1093): n is a, c, g, or t
  misc_feature (1098)..(1098): n is a, c, g, or t
  misc_feature (1103)..(1103): n is a, c, g, or t
  misc_feature (1105)..(1105): n is a, c, g, or t
  misc_feature (1113)..(1113): n is a, c, g, or t
  misc_feature (1124)..(1124): n is a, c, g, or t
  misc_feature (1129)..(1129): n is a, c, g, or t
  misc_feature (1138)..(1140): n is a, c, g, or t
  misc_feature (1165)..(1165): n is a, c, g, or t
  misc_feature (1169)..(1169): n is a, c, g, or t
  misc_feature (1171)..(1172): n is a, c, g, or t
  misc_feature (1175)..(1176): n is a, c, g, or t
  misc_feature (1180)..(1181): n is a, c, g, or t
  misc_feature (1184)..(1184): n is a, c, g, or t
  misc_feature (1190)..(1190): n is a, c, g, or t
  misc_feature (1195)..(1195): n is a, c, g, or t
naattagagaaattactatgagaggatcgcatcaccatcaccatcacggatcctatttaggtgacactatagaatcgtcgacccacgcgtccgctttgccatcccctcgagaagtgactgttacagaacggctcctcctggatggcccaccacctcattcaccagagactcctcaatttccccccacaactggagctgtactgtacactgttaagagaaaccaggttgggcctgaggttcgctcctgccccaaggcatcccccagacttcagaaagagagggagggccaaaaggcagtgagtgagtcanaggctttgatgctggtctgggatgcatcagaaactgagaaattgcctggtaccgtggaaccccctgcttccttcctgagtcctgtttcctcaaagaccagagatgcagggagaagacatgtgtccgggaaaccagacactcaagagagatggctgccctcaagcagagctcgggtgaagacaagagacaggacgtgccctgtccatgaatctccatcaggaattgacacctcagagacttctcccaaagcccctagagggggtttggctaaagacagtggaacacaggccaagggtccagagggggagcagcagccaaaggccgcagaagctacggtgtgtgccaacaacagcaaggtcagctccactggggaaaaggttgtcctgtggacaaggtaggtaagggtggatgacgtgtgtttggaaaaagagcatagaccacatccatgtggctccctagggttaatcatgatacctgggnttacagggnaagctgaccgtgtgatcctcaccatgtgccaagnacaagggggcacagnccacagaaccttcaanatcatcttcccaancagctgggaaaataaaaaccccttgctgaggntttcccnaccgnttttcnanaaactcatgcaactctttccnnactggcctgggaaacccngctctgaagganggaaggatgatgncancccattaccnncaatggcaaaccnanntgtntggaccatgggggacctttttntnntaaaaaaaaancnggantnaaangaaaattnttgggnaantcttnttaancngggaaccnaaaccccaaanggggncccctgggnnnccgggggaaggggggaaattttaancccngnnttnnaaannccnttgganccccnttttt

SEQ ID NO: 175 - DNA, 1280 bp, Homo Sapiens
  misc_feature (658)..(658): n is a, c, g, or t
  misc_feature (661)..(664): n is a, c, g, or t
  misc_feature (771)..(771): n is a, c, g, or t
  misc_feature (789)..(789): n is a, c, g, or t
  misc_feature (872)..(872): n is a, c, g, or t
  misc_feature (877)..(877): n is a, c, g, or t
  misc_feature (885)..(885): n is a, c, g, or t
  misc_feature (955)..(955): n is a, c, g, or t
  misc_feature (963)..(963): n is a, c, g, or t
  misc_feature (966)..(966): n is a, c, g, or t
  misc_feature (968)..(968): n is a, c, g, or t
  misc_feature (974)..(974): n is a, c, g, or t
  misc_feature (979)..(979): n is a, c, g, or t
  misc_feature (988)..(988): n is a, c, g, or t
  misc_feature (990)..(990): n is a, c, g, or t
  misc_feature (1007)..(1007): n is a, c, g, or t
  misc_feature (1022)..(1022): n is a, c, g, or t
  misc_feature (1035)..(1035): n is a, c, g, or t
  misc_feature (1039)..(1039): n is a, c, g, or t
  misc_feature (1055)..(1055): n is a, c, g, or t
  misc_feature (1069)..(1069): n is a, c, g, or t
  misc_feature (1071)..(1071): n is a, c, g, or t
  misc_feature (1073)..(1073): n is a, c, g, or t
  misc_feature (1093)..(1093): n is a, c, g, or t
  misc_feature (1105)..(1105): n is a, c, g, or t
  misc_feature (1107)..(1107): n is a, c, g, or t
  misc_feature (1121)..(1121): n is a, c, g, or t
  misc_feature (1132)..(1132): n is a, c, g, or t
  misc_feature (1138)..(1138): n is a, c, g, or t
  misc_feature (1143)..(1145): n is a, c, g, or t
  misc_feature (1159)..(1159): n is a, c, g, or t
  misc_feature (1164)..(1164): n is a, c, g, or t
  misc_feature (1166)..(1166): n is a, c, g, or t
  misc_feature (1188)..(1188): n is a, c, g, or t
  misc_feature (1191)..(1191): n is a, c, g, or t
  misc_feature (1194)..(1194): n is a, c, g, or t
  misc_feature (1198)..(1199): n is a, c, g, or t
  misc_feature (1202)..(1202): n is a, c, g, or t
  misc_feature (1208)..(1209): n is a, c, g, or t
  misc_feature (1213)..(1213): n is a, c, g, or t
  misc_feature (1220)..(1220): n is a, c, g, or t
  misc_feature (1231)..(1231): n is a, c, g, or t
  misc_feature (1233)..(1233): n is a, c, g, or t
  misc_feature (1241)..(1241): n is a, c, g, or t
  misc_feature (1252)..(1252): n is a, c, g, or t
  misc_feature (1260)..(1260): n is a, c, g, or t
  misc_feature (1271)..(1271): n is a, c, g, or t
  misc_feature (1277)..(1277): n is a, c, g, or t
atagagaaattactatgagaggatcgcatcaccatcaccatcacggatcctatttaggtgacactatagaatcgtcgacccacgcgtccggtgaaaagaaggcacggaaggctatgtccaaactgggtcttcggcaggttacaggagttactagagtcactatccggaaatctaagaatatcctctttgtcatcacaaaaccagatgtctacaagagccctgcttcagatacttacatagtttttggggaagccaagatcgaagatttatcccagcaagcacaactagcagctgctgagaaattcaaagttcaaggtgaagctgtctcaaacattcaagaaaacacacagactccaactgtacaagaggagagtgaagaggaagaggtcgatgaaacaggtgtagaagttaaggacatagaattggtcatgtcacaagcaaatgtgtcgagagcaaaggcagtccgagccctgaagaacaacagtaatgatattgtaaatgcgattatggaattaacaatgtaaccatatggaagcaactttttttggtgtctcaaaggagtaactgcagcttggtttgaaatttgtactgtttctatcataaataaagttatggcttcttgttggatgaaaaaaaaaaaaaaaaaaaaaaaaaaaanaannnnggggcggccgctccctatagtgagtcgtattaagcttaattagctgagcttggactcctgttgatagatccagtaatgacctcagaactccatctggatttgttcanaacgctcggttgccgccngggcgttttttattggtgagaatccaagctagcttggcgagattttcaggagctaaggaagctaaaatggagaaaaaaaatcnctggnatataccnccgttgatatatcccaatggccatcgtaaagaacattttgaggcatttcagtcagttgctcaatgtaccntataaccngancngttcanctggnaaatttacngncccttttttaaaaaccngtaaaaaaaaataanccccaagtttttntccnggccttttattcccanttctttcccccccngnangaatgccccctcccgggaantttcctatggcnantggaaaaacggggnactgggggganatgggnaaaannnttccccccttgttnacccngnttttcccttggaaccaaacttnaanccntttnnccncccccnngggngggaaanccccccccccnantttccggnggtttttccanccattttnttcccccaaangggggnggg

SEQ ID NO: 176 - DNA, 256 bp, Homo Sapiens
  misc_feature (5)..(5): n is a, c, g, or t
agagnaattactatgagaggatcgcatcaccatcaccatcacggatcctatttaggtgacactatagaatcgtcgacccacgcgtccgtgatgcggttcatgctattattcagccggcagggaaaactgcggctgcaaaaatggtacctggccacttcggacaaggaacggaagaagatggtgcgcgagctcatgcaggttgtcctggctcgaaagcccaagatgtgcagcttcctggagtggagggacctcaaag

SEQ ID NO: 177 - DNA, 256 bp, Homo Sapiens
  misc_feature (1)..(2): n is a, c, g, or t
  misc_feature (4)..(4): n is a, c, g, or t
nncntcaccatcacggatcctatttaggtgacactatagaatcgtcgacccacgcgtccgctgctggccagtccacccctagtccccacctggtgccttcacctgccccatctccagggcctggtccggtaccccctcgccccccagcagcagaaccacccccttgcctgcgccgaggcgccgcagctgcagacctgctctcctccagcccggagagccagcatggcggcactcagtctcctgggggtgggcagcc

SEQ ID NO: 178 - DNA, 1200 bp, Homo Sapiens
  misc_feature (4)..(4): n is a, c, g, or t
  misc_feature (936)..(936): n is a, c, g, or t
  misc_feature (955)..(955): n is a, c, g, or t
  misc_feature (959)..(959): n is a, c, g, or t
  misc_feature (997)..(997): n is a, c, g, or t
  misc_feature (1009)..(1009): n is a, c, g, or t
  misc_feature (1011)..(1011): n is a, c, g, or t
  misc_feature (1034)..(1034): n is a, c, g, or t
  misc_feature (1036)..(1036): n is a, c, g, or t
  misc_feature (1040)..(1040): n is a, c, g, or t
  misc_feature (1053)..(1054): n is a, c, g, or t
  misc_feature (1058)..(1058): n is a, c, g, or t
  misc_feature (1062)..(1062): n is a, c, g, or t
  misc_feature (1092)..(1092): n is a, c, g, or t
  misc_feature (1095)..(1095): n is a, c, g, or t
  misc_feature (1099)..(1099): n is a, c, g, or t
  misc_feature (1113)..(1113): n is a, c, g, or t
  misc_feature (1117)..(1117): n is a, c, g, or t
  misc_feature (1136)..(1136): n is a, c, g, or t
  misc_feature (1138)..(1139): n is a, c, g, or t
  misc_feature (1141)..(1141): n is a, c, g, or t
  misc_feature (1144)..(1144): n is a, c, g, or t
  misc_feature (1148)..(1148): n is a, c, g, or t
  misc_feature (1150)..(1150): n is a, c, g, or t
  misc_feature (1158)..(1158): n is a, c, g, or t
  misc_feature (1163)..(1163): n is a, c, g, or t
  misc_feature (1166)..(1166): n is a, c, g, or t
  misc_feature (1168)..(1168): n is a, c, g, or t
  misc_feature (1171)..(1171): n is a, c, g, or t
  misc_feature (1173)..(1173): n is a, c, g, or t
  misc_feature (1178)..(1178): n is a, c, g, or t
  misc_feature (1180)..(1180): n is a, c, g, or t
  misc_feature (1189)..(1189): n is a, c, g, or t
  misc_feature (1200)..(1200): n is a, c, g, or t
aatngagaaattactatgagaggatcgcatcaccatcaccatcacggatcctatttaggtgacactatagaatcgtcgacccacgcgtccgctggcggtgaacatggtgcccttccctcgcctgcacttcttcatgcccggcttcgcgcccctgaccagccggggcagccagcagtaccgggcgctcacggtgcccgagctcacccagcagatgttcgactccaagaacatgatggccgcctgcgacccgcgccacggccgctacctgacggtggctgccatcttccggggccgcatgtccatgaaggaggtggacgagcagatgctcaacgtgcagaacaagaacagcagctacttcgtggagtggatccccaacaacgtgaagacggccgtgtgcgacatcccgccccgcggcctgaagatgtcggccaccttcatcggcaacagcacggccatccaggagctgttcaagcgcatctccgagcagttcacggccatgttccggcgcaaggccttcctgcactggtacacgggcgagggcatggacgagatggagttcaccgaggccgagagcaacatgaacgacctggtgtccgagtaccagcagtaccaggacgccacggccgacgaacaaggggagttcgaggaggaggagggcgaggacgaggcttaaaaacttctcagatcaatcgtgcatccttagtgaacttctgttgtcctcaagcatggtctttctacttgtaaactatggtgctcagttttgcctctgttagaaattcacactgttgatgtaatgatgtggaactcctctaaaaattacagtattgtctgtgaaggtatctatactaataaaaaagcatgtgtagaaaaaaaaaaaaaaaaaaaaaaagggcggccgctccctatagtgagtcgtattaagcttaattaactgancttggactcctgttgatanatcnagtaatgacctcaaaactccatctggatttgttcaaangctcggttgccncnggcgttttttttggtgaaaatcnanctancttggcgaatttnngganctanggaactaaatggaaaaaaaatcctggaatnccncgtnaaaattccaatggnatcnaaaaaaattttgaggattnanncnttnccangnactaaacnaaacnttnantgnantaagncnttttaaaangaaaaaaaaan

SEQ ID NO: 179 - DNA, 256 bp, Homo Sapiens
  misc_feature (19)..(19): n is a, c, g, or t
ttattaaagaggagaaatnactctgagaggatcgcatcaccatcaccatcacggatcctatttaggtgacactatagaatcgtcgacccacgcgtccgggggggtgcgagagcaggtgcgtttctatgacacccgggggctccgagatggggccgaactgccccgacactgcttctcttgcactgatggctacgtcctggtctatagcacagatagcagagagtcttttcagcgtgtggagctgctcaagaaggag

SEQ ID NO: 180 - DNA, 256 bp, Homo Sapiens
tcttaaagaggagaattaactatgagaggatcgcatcaccatcaccatcacggatcctatttaggtgacactatagaatcgtcgacccacgcgtccgggcagaagcaagtaaaagataatgaaaatgtagtcaatgagtactcctcagaactggaaaagcaccaattatatatagatgagactgtgaatagcaatatcccaactaaccttcgtgtgcttcgttcaatcctggaaaacctgagaagcaaaatacaaa

SEQ ID NO: 181 - DNA, 1214 bp, Homo Sapiens
  misc_feature (910)..(910): n is a, c, g, or t
  misc_feature (926)..(926): n is a, c, g, or t
  misc_feature (932)..(932): n is a, c, g, or t
  misc_feature (944)..(944): n is a, c, g, or t
  misc_feature (985)..(985): n is a, c, g, or t
  misc_feature (992)..(992): n is a, c, g, or t
  misc_feature (1019)..(1019): n is a, c, g, or t
  misc_feature (1030)..(1030): n is a, c, g, or t
  misc_feature (1036)..(1036): n is a, c, g, or t
  misc_feature (1039)..(1039): n is a, c, g, or t
  misc_feature (1046)..(1046): n is a, c, g, or t
  misc_feature (1064)..(1064): n is a, c, g, or t
  misc_feature (1072)..(1072): n is a, c, g, or t
  misc_feature (1086)..(1086): n is a, c, g, or t
  misc_feature (1089)..(1089): n is a, c, g, or t
  misc_feature (1091)..(1091): n is a, c, g, or t
  misc_feature (1112)..(1112): n is a, c, g, or t
  misc_feature (1118)..(1118): n is a, c, g, or t
  misc_feature (1128)..(1129): n is a, c, g, or t
  misc_feature (1138)..(1138): n is a, c, g, or t
  misc_feature (1154)..(1154): n is a, c, g, or t
  misc_feature (1162)..(1164): n is a, c, g, or t
  misc_feature (1170)..(1170): n is a, c, g, or t
  misc_feature (1173)..(1173): n is a, c, g, or t
  misc_feature (1175)..(1175): n is a, c, g, or t
  misc_feature (1181)..(1181): n is a, c, g, or t
  misc_feature (1187)..(1187): n is a, c, g, or t
  misc_feature (1192)..(1192): n is a, c, g, or t
  misc_feature (1195)..(1195): n is a, c, g, or t
  misc_feature (1197)..(1198): n is a, c, g, or t
  misc_feature (1201)..(1201): n is a, c, g, or t
  misc_feature (1214)..(1214): n is a, c, g, or t
tagagaaattactatgagaggatcgcatcaccatcaccatcacggatcctatttaggtgacactatagaatcgtcgacccacgcgtccgcccacgcgtccgccaaaatgggaaaggaaaagactcatatcaacattgtcgtcattggacacgtagattcgggcaagtccaccactactggccatctgatctataaatgcggtggcatcgacaaaagaaccattgaaaaatttgagaaggaggctgctgagatgggaaagggctccttcaagtatgcctgggtcttggataaactgaaagctgagcgtgaacgtggtatcaccattgatatctccttgtggaaatttgagactagcaagtactatgtgactatcattgatgccccaggacacagagactttatcaaaaacatgattacagggacatctcaggctgactgtgctgtcctgattgttgctgctggtgttggtgaatttgaagctggtatctccaagaatgggcagacccgagagcatgcccttctggcttacacactgggtgtgaaacaactaattgtcggtgttaacaaaatggattccactgagccaccctacagccagaagagatatgaggaaattgttaaggaagtcagcacttacattaagaaaattggctacaaccccgacacagtagcatttgtgccaatttctggttggaatggtgacaacatgctggagccaagtgctaacatgccttggttcaagggatggaaagtcacccgtaaggatggcaatgccagtggaaccacgctgcttgaggctctggactgcatcctaccaccaactcgtccaactgacaagcccttgcgcctgcctctccaggatgtctacaaaattggtggtattggtactgttcctgttggccgagtgganactggtgttctccaancccggnatggtggtcacntttgctccagtcaacgttacaacggaagtaaaaatctgtcnaaatgcncctgaagctttgagtgaagctcttccnggggaaaatgngggctncantgtcaanaatgggtctgtcaagganttcccccnggcaccttgctggngancncaaaatgaccccccatggaanccctgnttccctgccnngggatatcngaaccctccagccaanaaccccgnnntgcccnttntnggatgnccccgnctcantgnannaanttgctgactaaan

SEQ ID NO: 182 - DNA, 256 bp, Homo Sapiens
atagagaaattactatgagaggatcgcatcaccatcaccatcacggatcctatttaggtgacactatagaatcgtcgacccacgcgtccgggccgcgaagggcgcggggctggagggtaggagagcgcgggaaagcgccccagacgccactcgcggcggacggcggccagttcccaggggtttggagccggcccgcggcgccatggctcacgtcggctcccgcaagcgctcgaggagtcgcagccggtcccgggga

SEQ ID NO: 183 - DNA, 1274 bp, Homo Sapiens
  misc_feature (741)..(741): n is a, c, g, or t
  misc_feature (795)..(795): n is a, c, g, or t
  misc_feature (829)..(829): n is a, c, g, or t
  misc_feature (891)..(891): n is a, c, g, or t
  misc_feature (897)..(897): n is a, c, g, or t
  misc_feature (899)..(899): n is a, c, g, or t
  misc_feature (903)..(903): n is a, c, g, or t
  misc_feature (923)..(923): n is a, c, g, or t
  misc_feature (934)..(934): n is a, c, g, or t
  misc_feature (938)..(938): n is a, c, g, or t
  misc_feature (941)..(941): n is a, c, g, or t
  misc_feature (944)..(944): n is a, c, g, or t
  misc_feature (948)..(948): n is a, c, g, or t
  misc_feature (950)..(950): n is a, c, g, or t
  misc_feature (955)..(955): n is a, c, g, or t
  misc_feature (959)..(959): n is a, c, g, or t
  misc_feature (964)..(964): n is a, c, g, or t
  misc_feature (972)..(973): n is a, c, g, or t
  misc_feature (977)..(977): n is a, c, g, or t
  misc_feature (979)..(979): n is a, c, g, or t
  misc_feature (992)..(992): n is a, c, g, or t
  misc_feature (994)..(994): n is a, c, g, or t
  misc_feature (1005)..(1006): n is a, c, g, or t
  misc_feature (1014)..(1014): n is a, c, g, or t
  misc_feature (1017)..(1017): n is a, c, g, or t
  misc_feature (1025)..(1025): n is a, c, g, or t
  misc_feature (1028)..(1028): n is a, c, g, or t
  misc_feature (1031)..(1031): n is a, c, g, or t
  misc_feature (1035)..(1035): n is a, c, g, or t
  misc_feature (1041)..(1041): n is a, c, g, or t
  misc_feature (1048)..(1048): n is a, c, g, or t
  misc_feature (1055)..(1055): n is a, c, g, or t
  misc_feature (1063)..(1063): n is a, c, g, or t
  misc_feature (1073)..(1074): n is a, c, g, or t
  misc_feature (1084)..(1084): n is a, c, g, or t
  misc_feature (1089)..(1089): n is a, c, g, or t
  misc_feature (1092)..(1093): n is a, c, g, or t
  misc_feature (1095)..(1096): n is a, c, g, or t
  misc_feature (1103)..(1103): n is a, c, g, or t
  misc_feature (1105)..(1105): n is a, c, g, or t
  misc_feature (1109)..(1109): n is a, c, g, or t
  misc_feature (1113)..(1113): n is a, c, g, or t
  misc_feature (1117)..(1117): n is a, c, g, or t
  misc_feature (1120)..(1121): n is a, c, g, or t
  misc_feature (1124)..(1124): n is a, c, g, or t
  misc_feature (1128)..(1131): n is a, c, g, or t
  misc_feature (1134)..(1134): n is a, c, g, or t
  misc_feature (1137)..(1141): n is a, c, g, or t
  misc_feature (1143)..(1143): n is a, c, g, or t
  misc_feature (1148)..(1274): n is a, c, g, or t
tagagaaattactatgagaggatcgcatcaccatcaccatcacggatcctatttaggtgacactatagaatcgtcgacccacgcgtccggctcgcgatgcctctacacaagtatcccgtgtggctctggaagcggctgcagctgcgggagggcatctgttcccgcctgcccggccactacctgcgctccctggaggaggagcggacgcccactcccgtgcactataggcctcatggggccaagttcaagatcaaccccaagaacgggcagcgggagcgtgtggaggacgtgcccattcccatctactttccccccgaatcccagcgggggttgtggggcggcgagggctggatcctgggccaaatatatgccaacaacgacaagctctccaagaggctgaagaaagtgtggaagccacagctgtttgagcgagagttctacagtgagatcctggacaagaagttcacagtgactgtgaccatgcggaccctggacctcatcgatgaggcttacgggctcgacttttacatcctcaagaccccgaaggaggacctgtgctccaagtttgggatggacctgaagcgagggatgctgctgcggcttgcccggcaggacccccagctgcaccccgaggaccccgagcggcgggcagccatctacgacaagtacaaggaatttgccatcccagaggaggaggcagagtgggtgggcctcacgctggaggaggccattgagaagcanagacttttggaggaaaaggaccctgtacccctgttcaagatctatgtggcgganctgatccagcagctgcagcagcaggcactgtcanagccggcggtggtgcaaaaaaaagccagtggccagtgaccacacagctcctccatgcctgancaaaangnccanctttccctgccaggcctttngcactgagganacanatnccngggnanctgtnaggnccccngtgggcanngggngnatcctggtttcgngngctgcccatgnncctttcanccnggggccanctnggnaggnatcccnagaagcntgggccncccaaagntcctctaggnngggccccaanttttnggnnannttccttngncccngggnccgnaannaanaaannnnggnccnnnnnanaaaannnnnnnnnnnnnnnnnnnnnnnnnnnnnnnnnnnnnnnnnnnnnnnnnnnnnnnnnnnnnnnnnnnnnnnnnnnnnnnnnnnnnnnnnnnnnnnnnnnnnnnnnnnnnnnnnnnnnnnnnnnnnnn

SEQ ID NO: 184 - DNA, 1204 bp, Homo Sapiens
  misc_feature (857)..(857): n is a, c, g, or t
  misc_feature (885)..(885): n is a, c, g, or t
  misc_feature (892)..(892): n is a, c, g, or t
  misc_feature (921)..(921): n is a, c, g, or t
  misc_feature (969)..(969): n is a, c, g, or t
  misc_feature (978)..(978): n is a, c, g, or t
  misc_feature (989)..(989): n is a, c, g, or t
  misc_feature (1022)..(1023): n is a, c, g, or t
  misc_feature (1027)..(1027): n is a, c, g, or t
  misc_feature (1041)..(1041): n is a, c, g, or t
  misc_feature (1066)..(1066): n is a, c, g, or t
  misc_feature (1076)..(1076): n is a, c, g, or t
  misc_feature (1084)..(1084): n is a, c, g, or t
  misc_feature (1094)..(1094): n is a, c, g, or t
  misc_feature (1105)..(1105): n is a, c, g, or t
  misc_feature (1107)..(1109): n is a, c, g, or t
  misc_feature (1111)..(1111): n is a, c, g, or t
  misc_feature (1128)..(1128): n is a, c, g, or t
  misc_feature (1130)..(1130): n is a, c, g, or t
  misc_feature (1136)..(1136): n is a, c, g, or t
  misc_feature (1147)..(1147): n is a, c, g, or t
  misc_feature (1150)..(1151): n is a, c, g, or t
  misc_feature (1154)..(1154): n is a, c, g, or t
  misc_feature (1165)..(1165): n is a, c, g, or t
  misc_feature (1171)..(1171): n is a, c, g, or t
  misc_feature (1176)..(1177): n is a, c, g, or t
  misc_feature (1183)..(1183): n is a, c, g, or t
  misc_feature (1193)..(1193): n is a, c, g, or t
tagagaaaattactatgagaggatcgcatcaccatcaccatcacggatcctatttaggtgacactatagaatcgtcgacccacgcgtccgctgaaatcgaagagaccctccaggctgcgatgccccaggtctcctaccgaatgcttgggagaatgttctggagggaagaaaatgcgaaagcagccttattagagctcactggcgctgtagattacgccgcgatccccagggagatgccgggcaaaggaggggtctggaaagtgttatttaagcccccaacttctgatgctgaatttttagaaagattgcacctcttcctagctagagaggggtggaccgtgcaagatgttgcccgtgtccttgggtttcagaaccctactccgaccccgggcccagagatgccagcagagatgctaaactatattttggataatgttattcagcctcttgttgagtccatatggtacaagaggctgacacttttctcggggagggacatcccagggcctggagaggaaacctttgatccctggctggagcacactaatgaggtcctagaggagtggcaggtgtccgatgtagaaaagaggcggcggttgatggagagtcttagaggccccgccgctgatgttattcgcatccttaagtccaacaaccccgcgataaccactgccgaatgcctgaaggcgcttgagcaggtgtttgggagcgttgagagctctagggatgcccagatcaaatttctgaacacttatcagaacccgggagaaaaatgtctgcttatgtcattcgtctggagcctctgctacagaaggtggtagagaagggggccattgataaagataatgtgaaccagncccgcctagagcaaggtcattgccgggnccaaccnacagcggggccatcccgaaggcagctgtngcttaccggggcctggggaaaggccccgcccccaaaccctcttttcantttgctggnggccaatccgngaggaagaaacccaaggaggaaggaggaggagnntgangcccccctttttgnatttaggcctggaaaggcccttttnaatgcccagnaaaggcantttttaatgncaaacctaaancnnncncttttttcttggccccngnggggtnttacaaaaggntcnncgnaaaaaaaaggntaaccnttttnntttttnttgtttttgnagggaaggtta

SEQ ID NO: 185 - DNA, 1192 bp, Homo Sapiens
  misc_feature (929)..(929): n is a, c, g, or t
  misc_feature (961)..(961): n is a, c, g, or t
  misc_feature (968)..(968): n is a, c, g, or t
  misc_feature (972)..(972): n is a, c, g, or t
  misc_feature (974)..(974): n is a, c, g, or t
  misc_feature (976)..(976): n is a, c, g, or t
  misc_feature (978)..(978): n is a, c, g, or t
  misc_feature (983)..(983): n is a, c, g, or t
  misc_feature (995)..(995): n is a, c, g, or t
  misc_feature (998)..(998): n is a, c, g, or t
  misc_feature (1032)..(1033): n is a, c, g, or t
  misc_feature (1035)..(1035): n is a, c, g, or t
  misc_feature (1038)..(1038): n is a, c, g, or t
  misc_feature (1041)..(1041): n is a, c, g, or t
  misc_feature (1047)..(1047): n is a, c, g, or t
  misc_feature (1049)..(1049): n is a, c, g, or t
  misc_feature (1052)..(1052): n is a, c, g, or t
  misc_feature (1067)..(1067): n is a, c, g, or t
  misc_feature (1075)..(1076): n is a, c, g, or t
  misc_feature (1080)..(1081): n is a, c, g, or t
  misc_feature (1083)..(1083): n is a, c, g, or t
  misc_feature (1085)..(1085): n is a, c, g, or t
  misc_feature (1092)..(1092): n is a, c, g, or t
  misc_feature (1095)..(1097): n is a, c, g, or t
  misc_feature (1099)..(1099): n is a, c, g, or t
  misc_feature (1104)..(1105): n is a, c, g, or t
  misc_feature (1109)..(1111): n is a, c, g, or t
  misc_feature (1113)..(1113): n is a, c, g, or t
  misc_feature (1116)..(1116): n is a, c, g, or t
  misc_feature (1118)..(1120): n is a, c, g, or t
  misc_feature (1122)..(1124): n is a, c, g, or t
  misc_feature (1126)..(1127): n is a, c, g, or t
  misc_feature (1130)..(1130): n is a, c, g, or t
  misc_feature (1133)..(1133): n is a, c, g, or t
  misc_feature (1139)..(1139): n is a, c, g, or t
  misc_feature (1145)..(1146): n is a, c, g, or t
  misc_feature (1148)..(1148): n is a, c, g, or t
  misc_feature (1151)..(1152): n is a, c, g, or t
  misc_feature (1156)..(1156): n is a, c, g, or t
  misc_feature (1159)..(1159): n is a, c, g, or t
  misc_feature (1161)..(1161): n is a, c, g, or t
  misc_feature (1167)..(1169): n is a, c, g, or t
  misc_feature (1174)..(1176): n is a, c, g, or t
  misc_feature (1179)..(1179): n is a, c, g, or t
  misc_feature (1181)..(1184): n is a, c, g, or t
  misc_feature (1187)..(1187): n is a, c, g, or t
  misc_feature (1192)..(1192): n is a, c, g, or t
tagagaaattactatgagaggatcgcatcaccatcaccattcacggatcctatttaggtgacactatagaatcgtcgacccacgcgtccggaacatgggtctgggaaaatcgctgtgatatcaggggtcggcaccaggaattattatagaaagatcggctacagattacaaggcccgtacatggtgaagatgctgaaataatggccacaccagtccactcttctgcagtatcctccctggcagaacacggagaatcaggatttcttaaatactcaacagagaggctgagcagagcaaatggggggcttcaccctcatcccgcagctgcagagactggaaactgccttcaaggccacggctggtcatctgctgaccacaccccagatccgccctctcctgcgtgcaccccaaaaaatcacttgcgtttttgaggcttaaatcatctatccagtttctacattttgcatgaggcctgcaggtggcctattttgactcagacggtgaaaaaagcaaattaactcatttggacaccataactcatgcaataaaactgattgtcattcgaggagcaaacttaagagtagtttatttatataccctggggacagaaagtcaggttgaaacaggaaaaccaccagactctaatctcagccctttaacgacatacgcattggagcgcaagttaggaaaatgagcttttgttttcatggaaatcattctgattacagtgctgatgtttagaaataaatagcagtgtgactgggaaagaggaattgcagttgtgggggtgtgagcctggcagcagccagccagcagcctctcccaggcggggagtctaccatccgagacggcgatgacaaagagcttcattccacattctttgttatctctacttcccaccctcttggcaactacagagcagtgggggncagcccccaagtgtggtccccaaaaagcgttnggctttnctgncngncnatccngacggggggaantcncaggtggggtgcccctaaatcaaaattgcttccnnanaanccnttactngnaanttttttttttttttnctgaaaanncccnntngntcccccnagnnngnagggnngggnnnantcncnnngnnncnnccnccnccgggnttaagnnanttnncccnccncncccccnnnaaaannnggnannnnggnccccn

SEQ ID NO: 186 - DNA, 256 bp, Homo Sapiens
attagagaaaattactatgagaggatcgcatcaccatcaccatcacggatcctatttaggtgacactatagaatcgtcgacccacgcgtccgcacagccgcaccccaataccgtctaccagtacggggacatggaggtgaagcagctggacaagcgggcctcaggccagagcttcgaggtcatcctcaagtccccttctgacctgtccccagagagccctatgctctcctccccacccaagaagaaggacacctcc

SEQ ID NO: 187 - DNA, 256 bp, Homo Sapiens
  misc_feature (3)..(3): n is a, c, g, or t
cgntcaccatcaccatcacggatcctatttaggtgacactatagaatcgtcgacccacgcgtccgctaaaaatgaaccaagaaaaacaaacgtcacacatgaagaacacacagcggtggaaaagatctcctccctggttcgaagggctgccctcacacacaacgacaaccacttcaattatgagaagacacacaactttaaggtccacacgttccgaggcccacactggtgtgaatattgtgccaatttcatgtgg

SEQ ID NO: 188 - DNA, 256 bp, Homo Sapiens
  misc_feature (1)..(1): n is a, c, g, or t
  misc_feature (8)..(8): n is a, c, g, or t
nttagagnaattactatgagaggatcgcatcaccatcaccatcacggatcctatttaggtgacactatagaatcgtcgacccacgcgtccgaaggcatcaaagctgaaattgatgcacgtaatgacagtttcacaacctgcattgaacttgggaaatccctgttggcgagaaaacactatgcatctgaggagatcaaggaaaaattactgcagttgacggaaaagaggaaagaaatgatcgacaagtgggaagacc

SEQ ID NO: 189 - DNA, 1193 bp, Homo Sapiens
  misc_feature (12)..(12): n is a, c, g, or t
  misc_feature (848)..(848): n is a, c, g, or t
  misc_feature (891)..(891): n is a, c, g, or t
  misc_feature (961)..(961): n is a, c, g, or t
  misc_feature (976)..(976): n is a, c, g, or t
  misc_feature (987)..(987): n is a, c, g, or t
  misc_feature (1012)..(1012): n is a, c, g, or t
  misc_feature (1014)..(1014): n is a, c, g, or t
  misc_feature (1016)..(1016): n is a, c, g, or t
  misc_feature (1044)..(1044): n is a, c, g, or t
  misc_feature (1080)..(1080): n is a, c, g, or t
  misc_feature (1093)..(1093): n is a, c, g, or t
  misc_feature (1097)..(1097): n is a, c, g, or t
  misc_feature (1099)..(1099): n is a, c, g, or t
  misc_feature (1101)..(1101): n is a, c, g, or t
  misc_feature (1103)..(1103): n is a, c, g, or t
  misc_feature (1105)..(1105): n is a, c, g, or t
  misc_feature (1111)..(1111): n is a, c, g, or t
  misc_feature (1113)..(1113): n is a, c, g, or t
  misc_feature (1140)..(1140): n is a, c, g, or t
  misc_feature (1145)..(1145): n is a, c, g, or t
  misc_feature (1151)..(1151): n is a, c, g, or t
  misc_feature (1172)..(1174): n is a, c, g, or t
  misc_feature (1180)..(1180): n is a, c, g, or t
  misc_feature (1189)..(1189): n is a, c, g, or t
tagagaaattanctatgagaggatcgcatcaccatcaccatcacggatcctatttaggtgacactatagaatcgtcgacccacgcgtccgtgagtctcaagatggacaaccgggatgttgcaggaaaggctaaccggtggtttggggttgctccccctaaatctggaaaaatgaacatgaacatccttcaccaggaagagctcatcgctcagaagaaacgggaaattgaagccaaaatggaacagaaagccaagcagaatcaggtggccagccctcagcccccacatcctggcgaaatcacaaatgcacacaactcttcctgcatttccaacaagtttgccaacgatggtagcttcttgcagcagtttctgaagttgcagaaggcacagaccagcacagacgccccgaccagtgcgcccagcgcccctcccagcacacccacccccagcgctgggaagaggtccctgctcatcagcaggcggacaggcctggggctggccagcctgccgggccctgtgaagagctactcccacgccaagcagctgcccgtggcgcaccgcccgagtgtcttccagtcccctgacgaggacgaggaggaggactatgagcagtggctggagatcaaagtttcacccccagagggagccgagactcggaaagtgatagagaaattggcccgctttgtggcagaaggaggccccgagttagaaaaagtagctatggaggactacaaggataacccagcatttgcatttttgcacgataagaatagcagggaattcctctactacaggaagaaggtggctgagataagaaaggaagcacagaagtcgcaggcagcctctcanaaagtttcacccccagaggacgaaaaggtcaagaaccttgcanaaaagttggccaggttcatagcggacgggggtcccgaggtggaaaccattgccctccaaaaaaccgtganaaccaggcattcagntttctgttgancccatagccagggtacagtactacnananaactggagaattccgaaagcaaggccanttccaaggagtttcaagccctgatccggctgaaccnagtccctctgagnctgnangntntnacccancncactgccggctgttcagctgggccatntttcntttcantgccgggaacacctccacccnnnaaaaangaaaaccgngggc

SEQ ID NO: 190 - DNA, 256 bp, Homo Sapiens
ccgaggaggtgctcttcggaaacctggacctgctgccccctcctgggaaaagcacgaagccaggtgctgcccccacagaacacaaagccttggtgtcccacaatggcagcctgattaacgtggggagcctgctgcagcgcgcggagcagcaggacagcggccggctctacctagagaacaagatccacacactggagctgaagctggaggagagccataaccgtttctcagccactgaagtaaccaataagacgct

SEQ ID NO: 191 - DNA, 1372 bp, Homo Sapiens
  misc_feature (802)..(802): n is a, c, g, or t
  misc_feature (872)..(872): n is a, c, g, or t
  misc_feature (936)..(936): n is a, c, g, or t
  misc_feature (985)..(985): n is a, c, g, or t
  misc_feature (989)..(989): n is a, c, g, or t
  misc_feature (1009)..(1009): n is a, c, g, or t
  misc_feature (1020)..(1020): n is a, c, g, or t
  misc_feature (1050)..(1050): n is a, c, g, or t
  misc_feature (1058)..(1058): n is a, c, g, or t
  misc_feature (1088)..(1088): n is a, c, g, or t
  misc_feature (1092)..(1092): n is a, c, g, or t
  misc_feature (1095)..(1095): n is a, c, g, or t
  misc_feature (1100)..(1100): n is a, c, g, or t
  misc_feature (1118)..(1118): n is a, c, g, or t
  misc_feature (1126)..(1126): n is a, c, g, or t
  misc_feature (1147)..(1147): n is a, c, g, or t
  misc_feature (1152)..(1152): n is a, c, g, or t
  misc_feature (1162)..(1163): n is a, c, g, or t
  misc_feature (1167)..(1167): n is a, c, g, or t
  misc_feature (1171)..(1171): n is a, c, g, or t
  misc_feature (1174)..(1174): n is a, c, g, or t
  misc_feature (1183)..(1183): n is a, c, g, or t
  misc_feature (1185)..(1185): n is a, c, g, or t
  misc_feature (1193)..(1194): n is a, c, g, or t
  misc_feature (1198)..(1198): n is a, c, g, or t
  misc_feature (1206)..(1206): n is a, c, g, or t
  misc_feature (1210)..(1210): n is a, c, g, or t
  misc_feature (1212)..(1212): n is a, c, g, or t
  misc_feature (1214)..(1214): n is a, c, g, or t
  misc_feature (1223)..(1223): n is a, c, g, or t
  misc_feature (1228)..(1228): n is a, c, g, or t
  misc_feature (1231)..(1231): n is a, c, g, or t
  misc_feature (1237)..(1238): n is a, c, g, or t
  misc_feature (1245)..(1245): n is a, c, g, or t
  misc_feature (1248)..(1249): n is a, c, g, or t
  misc_feature (1253)..(1253): n is a, c, g, or t
  misc_feature (1258)..(1258): n is a, c, g, or t
  misc_feature (1266)..(1266): n is a, c, g, or t
  misc_feature (1280)..(1280): n is a, c, g, or t
  misc_feature (1288)..(1289): n is a, c, g, or t
  misc_feature (1294)..(1294): n is a, c, g, or t
  misc_feature (1297)..(1297): n is a, c, g, or t
  misc_feature (1306)..(1308): n is a, c, g, or t
  misc_feature (1316)..(1316): n is a, c, g, or t
  misc_feature (1322)..(1322): n is a, c, g, or t
  misc_feature (1329)..(1329): n is a, c, g, or t
  misc_feature (1331)..(1331): n is a, c, g, or t
  misc_feature (1333)..(1333): n is a, c, g, or t
  misc_feature (1344)..(1344): n is a, c, g, or t
  misc_feature (1349)..(1349): n is a, c, g, or t
  misc_feature (1355)..(1355): n is a, c, g, or t
  misc_feature (1359)..(1359): n is a, c, g, or t
  misc_feature (1369)..(1369): n is a, c, g, or t
  misc_feature (1371)..(1372): n is a, c, g, or t
tagagaaattactatgagaggatcgcatcaccatcaccatcacggatcctatttaggtgacactatagaatcgtcgacccacgcgtccgacaagtctgaggaaaatgaggagccaatggaaacagatcagaatgcaaaggaggaagagaagatgcaagtggaccaggaggaaccacatgttgaagagcaacagcagcagacaccagcagaaaataaggcagagtctgaagaaatggagacctctcaagctggatccaaggataaaaagatggaccaaccaccccaagccaagaaggcaaaagtgaagaccagtactgtggacctgccaatcgagaatcagctattatggcagatagacagagagatgctcaacttgtacattgaaaatgagggtaagatgatcatgcaggataaactggagaaggagcggaatgatgctaagaacgcagtggaggaatatgtgtatgaaatgagagacaagcttagtggtgaatatgagaagtttgtgagtgaagatgatcgtaacagttttactttgaaactggaagatactgaaaattggttgtatgaggatggagaagaccagccaaagcaagtttatgttgataagttggctgaattaaaaaatctaggtcaacctattaagatacgtttccaggaatctgaagaacgaccaaaattatttgaagaactagggaaacagatccaacagtatatgaaaataatcagctctttcaaaaacaaggaggaccagtatgatcatttggatgctgctgacatgacaaaggtagaaaaaagcacnaaatgaagcaatggagtggatgaataacaagctaaatctgcagaacaagcagagtttgaccatggatccngttgtcaagtcaaaagagattgaagctaaaattaaggagctgacaagtacttgtagccctatantttcaagcccaacccaagtggaacctccaaagaggaccaaaaaatgccnagcnaatggaccatggatggacanggagacacccngcccccagctgctgaccaggtacaaacccnctgtgccntcggatcaaacaaaaacctcctgaatggcnttgnttnttccncccttgttcttttaaccnactttttnaaaaaaaaaaaaaaaaaaaanggcgncccccccctnngggngccnatnaccttattncngacctggnncccngttaaaancccnangncccccaacnccccnggntttttnnaaccccngtnncccnggggntttttttngggaaaaccccccnttttgggnnttttnggnccggggccnnngggaaaancccggntcccccntntnccccggccccnaaaantttggntttnttcttctctncnn

SEQ ID NO: 192 - DNA, 256 bp, Homo Sapiens
  misc_feature (37)..(37): n is a, c, g, or t
tcgagaaatataaaaattatttgctttgtgagcgganacaatataatagattaattgtgagcggataacaatttacacagaattattaaagaggagaaattaactatgagaggatcgcatcaccatcaccatcacggatcctatttaggtgacactatagaatcgtcgacccacgcgtccgactggttcctgggccaggcaggcagctccatcccatcaacttggccccggttctatgacacccgctacaaccaag

SEQ ID NO: 193 - DNA, 1200 bp, Homo Sapiens
  misc_feature (774)..(774): n is a, c, g, or t
  misc_feature (800)..(800): n is a, c, g, or t
  misc_feature (830)..(830): n is a, c, g, or t
  misc_feature (848)..(848): n is a, c, g, or t
  misc_feature (855)..(855): n is a, c, g, or t
  misc_feature (857)..(857): n is a, c, g, or t
  misc_feature (915)..(915): n is a, c, g, or t
  misc_feature (925)..(926): n is a, c, g, or t
  misc_feature (934)..(934): n is a, c, g, or t
  misc_feature (943)..(943): n is a, c, g, or t
  misc_feature (946)..(946): n is a, c, g, or t
  misc_feature (949)..(949): n is a, c, g, or t
  misc_feature (952)..(952): n is a, c, g, or t
  misc_feature (961)..(961): n is a, c, g, or t
  misc_feature (983)..(983): n is a, c, g, or t
  misc_feature (993)..(993): n is a, c, g, or t
  misc_feature (996)..(996): n is a, c, g, or t
  misc_feature (1007)..(1007): n is a, c, g, or t
  misc_feature (1011)..(1011): n is a, c, g, or t
  misc_feature (1015)..(1015): n is a, c, g, or t
  misc_feature (1019)..(1019): n is a, c, g, or t
  misc_feature (1023)..(1023): n is a, c, g, or t
  misc_feature (1025)..(1025): n is a, c, g, or t
  misc_feature (1029)..(1029): n is a, c, g, or t
  misc_feature (1036)..(1036): n is a, c, g, or t
  misc_feature (1038)..(1038): n is a, c, g, or t
  misc_feature (1045)..(1045): n is a, c, g, or t
  misc_feature (1058)..(1058): n is a, c, g, or t
  misc_feature (1063)..(1063): n is a, c, g, or t
  misc_feature (1068)..(1068): n is a, c, g, or t
  misc_feature (1073)..(1073): n is a, c, g, or t
  misc_feature (1078)..(1078): n is a, c, g, or t
  misc_feature (1091)..(1091): n is a, c, g, or t
  misc_feature (1102)..(1104): n is a, c, g, or t
  misc_feature (1109)..(1111): n is a, c, g, or t
  misc_feature (1114)..(1114): n is a, c, g, or t
  misc_feature (1116)..(1116): n is a, c, g, or t
  misc_feature (1124)..(1124): n is a, c, g, or t
  misc_feature (1130)..(1130): n is a, c, g, or t
  misc_feature (1136)..(1137): n is a, c, g, or t
  misc_feature (1163)..(1163): n is a, c, g, or t
  misc_feature (1167)..(1167): n is a, c, g, or t
  misc_feature (1174)..(1174): n is a, c, g, or t
  misc_feature (1184)..(1184): n is a, c, g, or t
  misc_feature (1187)..(1187): n is a, c, g, or t
  misc_feature (1191)..(1191): n is a, c, g, or t
  misc_feature (1196)..(1196): n is a, c, g, or t
attagagaaattactatgagaggatcgcatcaccatcaccatcacggatcctatttaggtgacactatagaatcgtcgacccacgcgtccggtcgccgatcccgccggaagcgccaggacaatggggacccgggacgacgagtacgactacctattcaaagtggtgctcatcggggactcaggcgtgggcaagagcaacctgctgtcgcgcttcacccgcaacgagttcaacctggagagcaagagcaccatcggcgtggagttcgccacccgcagcatccaggtggacggcaagaccatcaaggcgcagatctgggacaccgctggccaggagcgctaccgcgccatcacctccgcgtactaccgtggtgcagtgggcgccctgctggtgtacgacatcgccaagcacctgacctatgagaacgtggagcgctggctgaaggagctgcgggaccacgcagacagcaacatcgtcatcatgctggtgggcaacaagagtgacctgcgccacctgcgggctgtgcccactgacgaggcccgcgccttcgcagaaaagaacaacttgtccttcatcgagacctcagccttggattccactaacgtagaggaagcattcaagaacatcctcacaggtggccggggaccagatgggtgtgggtagggcaccagccaggcagggtggaacacggcctctgaaccttcgcttgttttgttcgtttgcttgtttttttcttttttttgtcggggcaggatggagttttgctctttgcccangctggagtgtggtggctcgatctcancttactgcaacctccgccttccaggttcangcaattctcctgcctcancctcccnantaactgggattacaggtgcctgccaccacacccgctaatttttgtaattttaataaanacaggatttnncaatgttntccaggttnatntcnaantccttgggntcaagtgatcctcttgcctcancctcccaaantgntgggaattaangggnggancccntgcncntggnctgtttnanttttttnccccccccccccntaacntttgnttttnaaacntgccgggtccccntggaaactttnnnagggnnnaananagttttancccttnttgggnntggggaaaaaaaaaaacccccttggncccnatttttnggggaagggnccnggcnttaantttt

SEQ ID NO: 194 - DNA, 256 bp, Homo Sapiens
  misc_feature (3)..(3): n is a, c, g, or t
  misc_feature (61)..(61): n is a, c, g, or t
  misc_feature (115)..(116): n is a, c, g, or t
  misc_feature (122)..(122): n is a, c, g, or t
  misc_feature (125)..(125): n is a, c, g, or t
  misc_feature (188)..(188): n is a, c, g, or t
ttntgaggagaattacctatgagaggatcgcatcaccatcaccatcacggatcctatttanttgacactatagaatcgtcgacccacgcgtccggaacaggacccgtctccatgnnccgtgnganccgtggacagaggaagggcgccgggtctgtgttccgcgcgcacgtgaagcaccgtaaaggcgntgcgcgcctgcgcgccgtggatttcgctgagcggcacggctacatcaagggcatcgtcaaggacatca

SEQ ID NO: 195 - DNA, 256 bp, Homo Sapiens
  misc_feature (2)..(2): n is a, c, g, or t
  misc_feature (60)..(60): n is a, c, g, or t
  misc_feature (187)..(187): n is a, c, g, or t
tnactatgagaggatcgcatcaccatcaccatcacggatcctatttaggtgacactatanaatcgtcgacccacgcgtccgtgcgctgtgctcgaggggtgccggccaggcctgagcgagcgagctagccagcaggcatcgagggggcgcggctgccgtccggacgagacaggcgaacccgacgcanaagagtccaccaccggacagccagcacatccacgatggagcgtcttgtcgcccgtgggaccttcccagt

SEQ ID NO: 196 - DNA, 256 bp, Homo Sapiens
  misc_feature (1)..(3): n is a, c, g, or t
  misc_feature (6)..(6): n is a, c, g, or t
nnnctntgagaggatcgcatcaccatcaccatcacggatcctatttaggtgacactatagaatcgtcgacccacgcgtccggcactcctgaaccggataccagcactgtaccccaggatgctgccaccatccccagctcagccatgcaggccccaacagtttgtatctacttgaacaagaatggcagcacaggcccccacttagataagaagaaggtccagcaactccctgaccattttggaccagcccgtgcctc

SEQ ID NO: 197 - DNA, 1304 bp, Homo Sapiens
  misc_feature (3)..(3): n is a, c, g, or t
  misc_feature (892)..(892): n is a, c, g, or t
  misc_feature (900)..(900): n is a, c, g, or t
  misc_feature (948)..(948): n is a, c, g, or t
  misc_feature (958)..(958): n is a, c, g, or t
  misc_feature (994)..(994): n is a, c, g, or t
  misc_feature (1004)..(1113): n is a, c, g, or t
  misc_feature (1118)..(1120): n is a, c, g, or t
  misc_feature (1126)..(1129): n is a, c, g, or t
  misc_feature (1133)..(1136): n is a, c, g, or t
  misc_feature (1141)..(1143): n is a, c, g, or t
  misc_feature (1147)..(1155): n is a, c, g, or t
  misc_feature (1159)..(1160): n is a, c, g, or t
  misc_feature (1164)..(1165): n is a, c, g, or t
  misc_feature (1167)..(1168): n is a, c, g, or t
  misc_feature (1172)..(1172): n is a, c, g, or t
  misc_feature (1174)..(1178): n is a, c, g, or t
  misc_feature (1180)..(1180): n is a, c, g, or t
  misc_feature (1184)..(1184): n is a, c, g, or t
  misc_feature (1187)..(1187): n is a, c, g, or t
  misc_feature (1192)..(1192): n is a, c, g, or t
  misc_feature (1196)..(1196): n is a, c, g, or t
  misc_feature (1206)..(1217): n is a, c, g, or t
  misc_feature (1222)..(1222): n is a, c, g, or t
  misc_feature (1231)..(1232): n is a, c, g, or t
  misc_feature (1234)..(1234): n is a, c, g, or t
  misc_feature (1238)..(1245): n is a, c, g, or t
  misc_feature (1247)..(1247): n is a, c, g, or t
  misc_feature (1251)..(1251): n is a, c, g, or t
  misc_feature (1253)..(1253): n is a, c, g, or t
  misc_feature (1259)..(1259): n is a, c, g, or t
  misc_feature (1261)..(1274): n is a, c, g, or t
  misc_feature (1282)..(1285): n is a, c, g, or t
  misc_feature (1287)..(1288): n is a, c, g, or t
  misc_feature (1290)..(1290): n is a, c, g, or t
  misc_feature (1295)..(1296): n is a, c, g, or t
  misc_feature (1298)..(1298): n is a, c, g, or t
  misc_feature (1302)..(1303): n is a, c, g, or t
atngagaaattactatgagaggatcgcatcaccatcaccatcacggatcctatttaggtgacactatagaatcgtcgacccacgcgtccgcggaccccgcaggagatgggtgcccccatccgcacactgtcctttggccaccggacatcatgcctcccaagaaggatgttcccgtgaagaaaccagcagggccctccatctccaaacctgctgctaagccagcagcagcaggggctcctccagccaagaccaaagctgagccagctgtcccccaggcccctcagaaaacccaggagcctccagtcgatctctccaaagtggtgatcgagtttaacaaggaccagctggaggagttcaaggaggccttcgagctgtttgaccgagtgggggatggcaagatcctgtacagccagtgtggggacgtgatgagggccctgggccagaaccccaccaacgccgaggtgctcaaggtcctggggaaccccaagagtgatgagctgaagtcgcggcgtgtggactttgagactttcctgcccatgctccaggcagtggccaagaaccgaggccaaggcacatatgaggactacttggaggggtttcgtgtgtttgacaaggaggggaacggcaaagtcatgggagcagagctcagacatgttctcaccacccttgcagtactagggtgaaatggaaagcaagaggcatccatgaccaggggaggattcccttgaggactgaggctatgggagaagaagaggtaccactctaaagagcgtggcctggccaggagagaagatgactgaggaggaggtggagaccgttctggcaggacacgaggacagcaacggctgcatcaactacgaggccttcttgaaacacatcctaagcgtctgantgctgcanatccagtggggtccggacactggggccccgcaggcgaaagcacgttcnagccaccagnaggccacctattgtttcaaaataaaaactgggttcntcaaaaaaannnnnnnnnnnnnnnnnnnnnnnnnnnnnnnnnnnnnnnnnnnnnnnnnnnnnnnnnnnnnnnnnnnnnnnnnnnnnnnnnnnnnnnnnnnnnnnnnnnnnnnnnnnnnnggggnnncccccnnnngggnnnnaaaannnttannnnnnnnntggnncccnngnnaaancnnnnngncccnaanccccngggntttttaaaannnnnnnnnnnnggggnttttttttnngnaaannnnnnnntngggnantttttngnnnnnnnnnnnnnnggaaaaannnngnnanccccnntntttnnc

SEQ ID NO: 198 - DNA, 1200 bp, Homo Sapiens
  misc_feature (1)..(2): n is a, c, g, or t
  misc_feature (4)..(4): n is a, c, g, or t
  misc_feature (833)..(833): n is a, c, g, or t
  misc_feature (913)..(913): n is a, c, g, or t
  misc_feature (954)..(954): n is a, c, g, or t
  misc_feature (980)..(980): n is a, c, g, or t
  misc_feature (982)..(982): n is a, c, g, or t
  misc_feature (986)..(987): n is a, c, g, or t
  misc_feature (989)..(989): n is a, c, g, or t
  misc_feature (994)..(994): n is a, c, g, or t
  misc_feature (997)..(998): n is a, c, g, or t
  misc_feature (1006)..(1006): n is a, c, g, or t
  misc_feature (1010)..(1010): n is a, c, g, or t
  misc_feature (1021)..(1021): n is a, c, g, or t
  misc_feature (1023)..(1023): n is a, c, g, or t
  misc_feature (1034)..(1034): n is a, c, g, or t
  misc_feature (1039)..(1039): n is a, c, g, or t
  misc_feature (1042)..(1044): n is a, c, g, or t
  misc_feature (1048)..(1048): n is a, c, g, or t
  misc_feature (1054)..(1054): n is a, c, g, or t
  misc_feature (1058)..(1058): n is a, c, g, or t
  misc_feature (1062)..(1062): n is a, c, g, or t
  misc_feature (1065)..(1065): n is a, c, g, or t
  misc_feature (1068)..(1068): n is a, c, g, or t
  misc_feature (1072)..(1072): n is a, c, g, or t
  misc_feature (1077)..(1077): n is a, c, g, or t
  misc_feature (1082)..(1082): n is a, c, g, or t
  misc_feature (1085)..(1085): n is a, c, g, or t
  misc_feature (1089)..(1089): n is a, c, g, or t
  misc_feature (1093)..(1093): n is a, c, g, or t
  misc_feature (1098)..(1098): n is a, c, g, or t
  misc_feature (1106)..(1106): n is a, c, g, or t
  misc_feature (1108)..(1109): n is a, c, g, or t
  misc_feature (1115)..(1115): n is a, c, g, or t
  misc_feature (1121)..(1121): n is a, c, g, or t
  misc_feature (1125)..(1125): n is a, c, g, or t
  misc_feature (1129)..(1129): n is a, c, g, or t
  misc_feature (1134)..(1134): n is a, c, g, or t
  misc_feature (1138)..(1138): n is a, c, g, or t
  misc_feature (1144)..(1144): n is a, c, g, or t
  misc_feature (1147)..(1147): n is a, c, g, or t
  misc_feature (1159)..(1161): n is a, c, g, or t
  misc_feature (1163)..(1163): n is a, c, g, or t
  misc_feature (1170)..(1170): n is a, c, g, or t
  misc_feature (1195)..(1195): n is a, c, g, or t
  misc_feature (1200)..(1200): n is a, c, g, or t
nnantagagaaattactatgagaggatcgcatcaccatcaccatcacggatcctatttaggtgacactatagaatcgtcgacccacgcgtccgcccacgcgtccgctttggaaaagaaaaccattgagtgggctgaagagattaagaaaatcgaagaagccgagcgggaagcagagtgcaaaattgcggaagcagaagctaaagtgaattctaagagtggcccagagggcgatagcaaaatgagcttctccaagactcacagtacagccacaatgccacctcctattaaccccatcctcgccagcttgcagcacaacagcatcctcacaccaactcgggtcagcagtagtgccacgaaacagaaagttctcagcccacctcacataaaggcggatttcaatcttgctgactttgagtgtgaagaagacccatttgataatctggagttaaaaactattgatgagaaggaagagctgagaaatattctggtaggaaccactggacccattatggctcagttattggacaataacttgcccaggggaggctctgggtctgtgttacaggatgaggaggtcctggcatccttggaacgggcaaccctagatttcaagcctcttcataaacccaatggctttataaccttaccacagttgggcaactgtgaaaagatgtcactgtcttccaaagtgtccctcccccctatacctgcagtaagcaatatcaaatccctgtctttccccaaacttgactctgatgacagcaatcagaagacagccaagctggcgagcactttccatagcacatcctgcctccgcaatggcacgttccanaattccctaaagccttccacccaaagcagtgccagtgagctcaatgggcatcacactcttgggctttcagccttgaactnggacagtggcccagagatgccagccctgacattcctcccanaggccttccctctctgttttgtctgngngccnnanaggantcnncccctccnaaanactgggtcccncnggtcccccccncctanttnnncagngtcccnagtngccnacntgncccngcctntcccnagncctntttngaatngcaaatgntnncccccnccaggnggcnatgnggggnaaangggggncanattgggccaccnnnanaaggggntcccccaaccttgaaaaaaaaaggnaaaan

SEQ ID NO: 199 - DNA, 256 bp, Homo Sapiens
tgaccagcctgcggccaccagtacaggccaaccccgacctgctgagcctgctcacggtgtctctggatcagtatcagacggaggatgagctgtaccagctgtccctgcagcgggagccgcgctccaagtcctcgccaaccagccccacgagttgcaccccaccaccccggcccccggtactggaggagtggacctcggctgccaaacccaagctggatcaggccctcgtggtggagcacatcgagaagatggtgga

SEQ ID NO: 200 - DNA, 1470 bp, Homo Sapiens
  misc_feature (483)..(483): n is a, c, g, or t
  misc_feature (494)..(494): n is a, c, g, or t
  misc_feature (507)..(507): n is a, c, g, or t
  misc_feature (518)..(518): n is a, c, g, or t
  misc_feature (524)..(525): n is a, c, g, or t
  misc_feature (527)..(529): n is a, c, g, or t
  misc_feature (538)..(538): n is a, c, g, or t
  misc_feature (541)..(541): n is a, c, g, or t
  misc_feature (549)..(549): n is a, c, g, or t
  misc_feature (559)..(559): n is a, c, g, or t
  misc_feature (566)..(566): n is a, c, g, or t
  misc_feature (574)..(574): n is a, c, g, or t
  misc_feature (576)..(577): n is a, c, g, or t
  misc_feature (586)..(586): n is a, c, g, or t
  misc_feature (597)..(597): n is a, c, g, or t
  misc_feature (618)..(618): n is a, c, g, or t
  misc_feature (622)..(622): n is a, c, g, or t
  misc_feature (628)..(629): n is a, c, g, or t
  misc_feature (633)..(634): n is a, c, g, or t
  misc_feature (636)..(637): n is a, c, g, or t
  misc_feature (641)..(641): n is a, c, g, or t
  misc_feature (645)..(645): n is a, c, g, or t
  misc_feature (648)..(648): n is a, c, g, or t
  misc_feature (662)..(663): n is a, c, g, or t
  misc_feature (671)..(671): n is a, c, g, or t
  misc_feature (673)..(673): n is a, c, g, or t
  misc_feature (683)..(686): n is a, c, g, or t
  misc_feature (688)..(688): n is a, c, g, or t
  misc_feature (694)..(694): n is a, c, g, or t
  misc_feature (696)..(696): n is a, c, g, or t
  misc_feature (707)..(708): n is a, c, g, or t
  misc_feature (720)..(720): n is a, c, g, or t
  misc_feature (722)..(723): n is a, c, g, or t
  misc_feature (726)..(726): n is a, c, g, or t
  misc_feature (730)..(730): n is a, c, g, or t
  misc_feature (734)..(734): n is a, c, g, or t
  misc_feature (744)..(747): n is a, c, g, or t
  misc_feature (756)..(756): n is a, c, g, or t
  misc_feature (768)..(768): n is a, c, g, or t
  misc_feature (777)..(777): n is a, c, g, or t
  misc_feature (779)..(779): n is a, c, g, or t
  misc_feature (783)..(783): n is a, c, g, or t
  misc_feature (790)..(790): n is a, c, g, or t
  misc_feature (793)..(793): n is a, c, g, or t
  misc_feature (799)..(799): n is a, c, g, or t
  misc_feature (803)..(804): n is a, c, g, or t
  misc_feature (816)..(817): n is a, c, g, or t
  misc_feature (822)..(822): n is a, c, g, or t
  misc_feature (836)..(836): n is a, c, g, or t
  misc_feature (841)..(843): n is a, c, g, or t
  misc_feature (848)..(848): n is a, c, g, or t
  misc_feature (854)..(855): n is a, c, g, or t
  misc_feature (857)..(857): n is a, c, g, or t
  misc_feature (862)..(863): n is a, c, g, or t
  misc_feature (867)..(867): n is a, c, g, or t
  misc_feature (873)..(873): n is a, c, g, or t
  misc_feature (878)..(879): n is a, c, g, or t
  misc_feature (884)..(884): n is a, c, g, or t
  misc_feature (891)..(892): n is a, c, g, or t
  misc_feature (895)..(897): n is a, c, g, or t
  misc_feature (912)..(913): n is a, c, g, or t
  misc_feature (928)..(928): n is a, c, g, or t
  misc_feature (943)..(949): n is a, c, g, or t
  misc_feature (957)..(957): n is a, c, g, or t
  misc_feature (959)..(959): n is a, c, g, or t
  misc_feature (975)..(975): n is a, c, g, or t
  misc_feature (977)..(977): n is a, c, g, or t
  misc_feature (986)..(986): n is a, c, g, or t
  misc_feature (989)..(989): n is a, c, g, or t
  misc_feature (991)..(992): n is a, c, g, or t
  misc_feature (1002)..(1003): n is a, c, g, or t
  misc_feature (1005)..(1005): n is a, c, g, or t
  misc_feature (1008)..(1008): n is a, c, g, or t
  misc_feature (1018)..(1019): n is a, c, g, or t
  misc_feature (1021)..(1021): n is a, c, g, or t
  misc_feature (1023)..(1023): n is a, c, g, or t
  misc_feature (1026)..(1027): n is a, c, g, or t
  misc_feature (1034)..(1034): n is a, c, g, or t
  misc_feature (1038)..(1038): n is a, c, g, or t
  misc_feature (1042)..(1042): n is a, c, g, or t
  misc_feature (1053)..(1053): n is a, c, g, or t
  misc_feature (1056)..(1056): n is a, c, g, or t
  misc_feature (1059)..(1059): n is a, c, g, or t
  misc_feature (1061)..(1061): n is a, c, g, or t
  misc_feature (1068)..(1068): n is a, c, g, or t
  misc_feature (1077)..(1078): n is a, c, g, or t
  misc_feature (1083)..(1083): n is a, c, g, or t
  misc_feature (1095)..(1095): n is a, c, g, or t
  misc_feature (1104)..(1104): n is a, c, g, or t
  misc_feature (1109)..(1109): n is a, c, g, or t
  misc_feature (1111)..(1111): n is a, c, g, or t
  misc_feature (1119)..(1119): n is a, c, g, or t
  misc_feature (1128)..(1128): n is a, c, g, or t
  misc_feature (1138)..(1139): n is a, c, g, or t
  misc_feature (1152)..(1152): n is a, c, g, or t
  misc_feature (1159)..(1159): n is a, c, g, or t
  misc_feature (1162)..(1162): n is a, c, g, or t
  misc_feature (1165)..(1166): n is a, c, g, or t
  misc_feature (1168)..(1168): n is a, c, g, or t
  misc_feature (1170)..(1171): n is a, c, g, or t
  misc_feature (1175)..(1175): n is a, c, g, or t
  misc_feature (1186)..(1186): n is a, c, g, or t
  misc_feature (1200)..(1201): n is a, c, g, or t
  misc_feature (1203)..(1203): n is a, c, g, or t
  misc_feature (1206)..(1207): n is a, c, g, or t
  misc_feature (1210)..(1210): n is a, c, g, or t
  misc_feature (1213)..(1213): n is a, c, g, or t
  misc_feature (1221)..(1221): n is a, c, g, or t
  misc_feature (1228)..(1228): n is a, c, g, or t
  misc_feature (1236)..(1237): n is a, c, g, or t
  misc_feature (1241)..(1241): n is a, c, g, or t
  misc_feature (1246)..(1246): n is a, c, g, or t
  misc_feature (1257)..(1258): n is a, c, g, or t
  misc_feature (1260)..(1260): n is a, c, g, or t
  misc_feature (1267)..(1267): n is a, c, g, or t
  misc_feature (1272)..(1272): n is a, c, g, or t
  misc_feature (1280)..(1280): n is a, c, g, or t
  misc_feature (1283)..(1283): n is a, c, g, or t
  misc_feature (1289)..(1290): n is a, c, g, or t
  misc_feature (1294)..(1294): n is a, c, g, or t
  misc_feature (1306)..(1306): n is a, c, g, or t
  misc_feature (1312)..(1313): n is a, c, g, or t
  misc_feature (1323)..(1323): n is a, c, g, or t
  misc_feature (1327)..(1329): n is a, c, g, or t
  misc_feature (1332)..(1332): n is a, c, g, or t
  misc_feature (1340)..(1340): n is a, c, g, or t
  misc_feature (1345)..(1345): n is a, c, g, or t
  misc_feature (1358)..(1358): n is a, c, g, or t
  misc_feature (1360)..(1361): n is a, c, g, or t
  misc_feature (1365)..(1365): n is a, c, g, or t
  misc_feature (1375)..(1375): n is a, c, g, or t
  misc_feature (1384)..(1384): n is a, c, g, or t
  misc_feature (1390)..(1390): n is a, c, g, or t
  misc_feature (1397)..(1397): n is a, c, g, or t
  misc_feature (1401)..(1401): n is a, c, g, or t
  misc_feature (1409)..(1409): n is a, c, g, or t
  misc_feature (1415)..(1415): n is a, c, g, or t
  misc_feature (1423)..(1423): n is a, c, g, or t
  misc_feature (1426)..(1427): n is a, c, g, or t
  misc_feature (1429)..(1429): n is a, c, g, or t
  misc_feature (1439)..(1440): n is a, c, g, or t
  misc_feature (1448)..(1448): n is a, c, g, or t
  misc_feature (1452)..(1452): n is a, c, g, or t
  misc_feature (1458)..(1458): n is a, c, g, or t
  misc_feature (1460)..(1460): n is a, c, g, or t
gagaaattactatgagaggatcgcatcaccatcaccatcacgggatcctatttaggtgacactatagaatcgtcgacccacgcgtccgcccacgcgtccggtttttttttcttttgagatggagtttcactcttgttgcccaggctatgggaagaaatgaaatcattacgactaacagatctaaaaagcatgagaacatcccagagggacgcaggggtgtgttccgagtgtgctacagacaggtaatttttatttttgtgttgcactggtgaacagaacataattgtgaatctgtagacatacataccataatatatagaagatctatggagactttctatgctaaattatacccttctgtatttgtgatacagaactggaataagatgaacatattattaaaccagggaggcccactgcagcaccaaaaaaaaaaaaaaaaaaaaaaaaaaaaaaaaaaaaaaaaaaaaaaaaaaaaaaaangggcggccgcnccctatagggagncgaattaagcntagttnncnnnccttggacnccngttgatanctccagtaangaccccngaactccntnnggatttgtncaaaacgctcngtagcccccgggggttttttnttgnagaaannccanncnncctnggcnatnttttcgggagctanngaacctantngggaaaaaannnncncgggananacccccgttgnnatatcccaatgncnncgnaaanaacntttggaggcnnnncaggcagtngctcaaagaacntaaaaaccnanaccngttcagntgnaatatngacnnccctttttaaannccgtnaaggaaaaaataanccccnnnttttnatcccnncntttannacanatttcntgccnngcctnaaagagnnctnnntccgaaattttcggnncggcaaaaaaaaaanccccgcccctggttnnnnnnnggggaaangngttcccccccttgttncnccggttttnccnannaagcgaaccnncnctngttttccccnntncnggnnagaaaanccanaacnatttcccgccnttntcnanaaaaaantcccaaaannggggngggtttcccggnaaaaacccngcccnanttcccaanggggtttantaaaaaaagnnttttttccccccngccaatnccnggnngnanntttncccccgttttnaatttaaccggggnnanatnnganaantttttttncccccgntttcccanngggnaaatnttatcccccgnntnccaaggngaaanccctgggnatncgggcnnccgnccctttgggggnttcccnntcccaaaagngttnnnaantccccccncggcnaaggggggggggncnnaatntttttagggngttgggggncctttntccgggnaatntccccctnaccccnaaaaaaanccnntnaaaaggcctnntttcgggngggncccccncnggaaaccccc

SEQ ID NO: 201 - DNA, 1357 bp, Homo Sapiens
  misc_feature (867)..(867): n is a, c, g, or t
  misc_feature (911)..(911): n is a, c, g, or t
  misc_feature (913)..(913): n is a, c, g, or t
  misc_feature (925)..(925): n is a, c, g, or t
  misc_feature (936)..(936): n is a, c, g, or t
  misc_feature (960)..(960): n is a, c, g, or t
  misc_feature (969)..(969): n is a, c, g, or t
  misc_feature (978)..(978): n is a, c, g, or t
  misc_feature (983)..(984): n is a, c, g, or t
  misc_feature (994)..(994): n is a, c, g, or t
  misc_feature (1001)..(1001): n is a, c, g, or t
  misc_feature (1004)..(1005): n is a, c, g, or t
  misc_feature (1010)..(1010): n is a, c, g, or t
  misc_feature (1015)..(1015): n is a, c, g, or t
  misc_feature (1035)..(1035): n is a, c, g, or t
  misc_feature (1046)..(1046): n is a, c, g, or t
  misc_feature (1053)..(1053): n is a, c, g, or t
  misc_feature (1062)..(1062): n is a, c, g, or t
  misc_feature (1066)..(1066): n is a, c, g, or t
  misc_feature (1083)..(1083): n is a, c, g, or t
  misc_feature (1091)..(1091): n is a, c, g, or t
  misc_feature (1093)..(1093): n is a, c, g, or t
  misc_feature (1113)..(1113): n is a, c, g, or t
  misc_feature (1116)..(1116): n is a, c, g, or t
  misc_feature (1118)..(1118): n is a, c, g, or t
  misc_feature (1124)..(1124): n is a, c, g, or t
  misc_feature (1138)..(1138): n is a, c, g, or t
  misc_feature (1145)..(1145): n is a, c, g, or t
  misc_feature (1148)..(1148): n is a, c, g, or t
  misc_feature (1150)..(1150): n is a, c, g, or t
  misc_feature (1153)..(1153): n is a, c, g, or t
  misc_feature (1162)..(1162): n is a, c, g, or t
  misc_feature (1164)..(1164): n is a, c, g, or t
  misc_feature (1173)..(1174): n is a, c, g, or t
  misc_feature (1192)..(1192): n is a, c, g, or t
  misc_feature (1196)..(1196): n is a, c, g, or t
  misc_feature (1198)..(1198): n is a, c, g, or t
  misc_feature (1207)..(1207): n is a, c, g, or t
  misc_feature (1209)..(1209): n is a, c, g, or t
  misc_feature (1222)..(1222): n is a, c, g, or t
  misc_feature (1232)..(1232): n is a, c, g, or t
  misc_feature (1245)..(1245): n is a, c, g, or t
  misc_feature (1258)..(1258): n is a, c, g, or t
  misc_feature (1261)..(1262): n is a, c, g, or t
  misc_feature (1265)..(1265): n is a, c, g, or t
  misc_feature (1276)..(1276): n is a, c, g, or t
  misc_feature (1282)..(1285): n is a, c, g, or t
  misc_feature (1292)..(1293): n is a, c, g, or t
  misc_feature (1299)..(1299): n is a, c, g, or t
  misc_feature (1314)..(1314): n is a, c, g, or t
  misc_feature (1316)..(1316): n is a, c, g, or t
  misc_feature (1318)..(1321): n is a, c, g, or t
  misc_feature (1324)..(1325): n is a, c, g, or t
  misc_feature (1330)..(1330): n is a, c, g, or t
  misc_feature (1339)..(1340): n is a, c, g, or t
  misc_feature (1343)..(1343): n is a, c, g, or t
  misc_feature (1347)..(1347): n is a, c, g, or t
tagagaaattactatgagaggatcgcatcaccatcaccatcacggatcctatttaggtgacactatagaatcgtcgacccacgcgtccggcacaataagagctcgctgcagtctcgaactcctggtctcaagtgatcctcctgcctcagcctcccaagtagctgagactacaggagcgtgccatcacacctgtgtaattgacttattttttgtagagggtctcactttgttgcccaggctgatctcaaactcctgacctcaagtgattctcccacctcagcctcccaaagtgccgggatgacaagtgtggctgagttggtatgggctctcctttccccatatccaaggcaagcttccaggattcttctgggacatcaggtgttagggaccatcttagtccctacctcagtttcacacatgagaaaattgaagtccacagaggaggtgtggcttcatcaaaaacccactgagaacgagtgttagaatcaggctaggacacattggactcctcctccagggctctctgacatccaaggccctttgaaatctctctccagctgcaaacagatttctagacttctgatggaggtgatctgagatgagcagcctctaaaagcagcctctgcgagcctctaagagtagccgggacctgctggagaacagaacatggcctaggagcgcaacagccaagtgttcagcaccacggacagcttcgctggcctattgctggggaggccagaggtggggaggctggttgtccagcaagacagagtgccatgggagagagaaaaaaacatgggaaagatctcagagaccatctagtccagcctcctcgatttggatgggaggagacccaggacaagaganaagtgacttgtccaaggtcacacaacaagtcagtaaaaagccananatgggagctganagcctacttcntcacacctcttcaaggcctcaaanacctggggnccatgactnattannggcacagccnaaacctngannaaggnctccnaaattaaaattacctgtccntggaaatggcnagaaaanaaaaagggnaaantccaaaaaattggaaanaacccccngnccctgaaaggaaaagtctgngantnggcccntaatgcaaggtttnaaagaanctncntanttccagggnanggggccttnnaaaaaaatttatttaccngggnanccctttccngntttccccccgggnaattccgggnatttttccccccnaaaaaggcccccnttnnccnaagggcccaancctggnnnnaaaaacnnccgccncccccaagggggggnanannnnaannccccngccccaaannttnaaanggggggttaa

SEQ ID NO: 202 - DNA, 1356 bp, Homo Sapiens
  misc_feature (1)..(1): n is a, c, g, or t
  misc_feature (873)..(873): n is a, c, g, or t
  misc_feature (885)..(885): n is a, c, g, or t
  misc_feature (897)..(897): n is a, c, g, or t
  misc_feature (903)..(903): n is a, c, g, or t
  misc_feature (972)..(972): n is a, c, g, or t
  misc_feature (992)..(992): n is a, c, g, or t
  misc_feature (1008)..(1008): n is a, c, g, or t
  misc_feature (1032)..(1032): n is a, c, g, or t
  misc_feature (1035)..(1035): n is a, c, g, or t
  misc_feature (1052)..(1052): n is a, c, g, or t
  misc_feature (1063)..(1063): n is a, c, g, or t
  misc_feature (1066)..(1066): n is a, c, g, or t
  misc_feature (1073)..(1073): n is a, c, g, or t
  misc_feature (1078)..(1078): n is a, c, g, or t
  misc_feature (1089)..(1089): n is a, c, g, or t
  misc_feature (1096)..(1096): n is a, c, g, or t
  misc_feature (1098)..(1098): n is a, c, g, or t
  misc_feature (1100)..(1101): n is a, c, g, or t
  misc_feature (1104)..(1104): n is a, c, g, or t
  misc_feature (1107)..(1107): n is a, c, g, or t
  misc_feature (1128)..(1128): n is a, c, g, or t
  misc_feature (1130)..(1130): n is a, c, g, or t
  misc_feature (1135)..(1135): n is a, c, g, or t
  misc_feature (1140)..(1140): n is a, c, g, or t
  misc_feature (1147)..(1147): n is a, c, g, or t
  misc_feature (1161)..(1161): n is a, c, g, or t
  misc_feature (1165)..(1165): n is a, c, g, or t
  misc_feature (1168)..(1168): n is a, c, g, or t
  misc_feature (1171)..(1171): n is a, c, g, or t
  misc_feature (1173)..(1173): n is a, c, g, or t
  misc_feature (1178)..(1178): n is a, c, g, or t
  misc_feature (1182)..(1182): n is a, c, g, or t
  misc_feature (1191)..(1192): n is a, c, g, or t
  misc_feature (1198)..(1198): n is a, c, g, or t
  misc_feature (1201)..(1202): n is a, c, g, or t
  misc_feature (1212)..(1213): n is a, c, g, or t
  misc_feature (1215)..(1215): n is a, c, g, or t
  misc_feature (1217)..(1217): n is a, c, g, or t
  misc_feature (1219)..(1219): n is a, c, g, or t
  misc_feature (1221)..(1221): n is a, c, g, or t
  misc_feature (1245)..(1245): n is a, c, g, or t
  misc_feature (1252)..(1252): n is a, c, g, or t
  misc_feature (1257)..(1257): n is a, c, g, or t
  misc_feature (1261)..(1262): n is a, c, g, or t
  misc_feature (1264)..(1264): n is a, c, g, or t
  misc_feature (1271)..(1271): n is a, c, g, or t
  misc_feature (1274)..(1274): n is a, c, g, or t
  misc_feature (1278)..(1279): n is a, c, g, or t
  misc_feature (1282)..(1282): n is a, c, g, or t
  misc_feature (1286)..(1286): n is a, c, g, or t
  misc_feature (1299)..(1299): n is a, c, g, or t
  misc_feature (1304)..(1305): n is a, c, g, or t
  misc_feature (1312)..(1313): n is a, c, g, or t
  misc_feature (1323)..(1323): n is a, c, g, or t
  misc_feature (1328)..(1330): n is a, c, g, or t
  misc_feature (1337)..(1337): n is a, c, g, or t
  misc_feature (1341)..(1341): n is a, c, g, or t
  misc_feature (1345)..(1346): n is a, c, g, or t
  misc_feature (1351)..(1351): n is a, c, g, or t
naatagagaaattactatgagaggatcgcatcaccatcaccatcacggatcctatttaggtgacactatagaatcgtcgacccacgcgtccggtgggggtaccgagatctgcgggagcagcggtcccggcttcagttctagcctacccggcagcctggacgggagcaaggcgagaggtgctgccgcctcccgtcgcccctgcgctcagaggtcccgaaccagcccagccgctgcctcttgccgctccgcctttggagtgaggagggcgcagcccgcgtcagaacttagagggccaggcagggtcgcgcgcatggcccgggcgcgcaaccggccccgcccccaggccctctgccaccgccgcgaccaatgaggtttctgacctcctgcagcctcctcttgcctcgggctgcccagatcttggcggctgaggctggcttaccttcgagccgttccttcatgggatttgctgctcccttcaccaacaagcgaaaggcttactcggagcgtagaatcatggggtactcaatgcaggagatgtatgaggtggtgtccaacgtccaggagtatcgtgagtttgtgccctggtgtaagaagtctctggtggtatccagccgtaagggtcatttgaaagcccagctggaggttggctttccacctgtcatggaacgttacacctctgcagtttccatggtcaaacctcacatggtcaaggctgtttgtactgatggcaagctcttcaaccacttagagactatttggcgattcagccctggtattcctgcctatcctcgaacctgcactgtggacttttcgatttcctttgaatttcgttctctgctgcactcccagctggccaccatgttttttgatgangttgtcaaacanaatgttgctgcntttgancgtcgggcagccaccaagtttggtccaaaaaaagccatcccccgtgaactgatgttcatgaggggcacnaaacttgaggcaaggaatgntccctgaactcccttntacccaatttcctaaaaaaattcnctnattaattgggttgggcnccggttccaanttnaaaagantctgngttcaaaaaanggtttcncncnnaanttnccaaaaaattgggttttatgntngctgnaaatnttggggnaaaaaaaaggcaangatntgnaantnaaatntttnaaaaaaggnnaggccnttnnaaaaaaaaanntncngnanctttttaaaaaaaaaaaaaaaaanttgggtnttttngggnntnaaaaaanttntttnnaangggnaaaaaaaattttnaaaannaaaaatnntttttttggnaaaannnggggggnaaantttnnccccnaaatc

SEQ ID NO: 203 - DNA, 256 bp, Homo Sapiens
cggaggacgagctggcccgcgactggaccaagcggcgcatgaaggatgaccttgtgcccgagaccgcacggctcaactacactcgaccagggctccccacgctgaacccccagctgctagaggcatggaagaatgaagtgaaggagaaaggccacgtcaactgtcccaacgactgctgtgaagccatctactccagcgtgtccggactcaaggctcatctcgccagctgcagtaagggggcccacctggcagggaa

SEQ ID NO: 204 - DNA, 256 bp, Homo Sapiens
tctgcagatctccaggggagcccaccagcctagtcaacatggcctcggaagacattgccaagctggcagagacacttgccaagactcaggtggccgggggacagctgagtttcaaaggcaagagcctcaaactcaacactgcagaagatgctaaagatgtgattaaagagattgaagactttgacagcttggaggctctgcgtctggaaggcaacacagtgggcgtggaagcagccagggtcatcgccaaggcctt

SEQ ID NO: 205 - DNA, 256 bp, Homo Sapiens
ttccactgccacccgatgtgtccacgatgccccaggccacctccccacctctgtggcccctgagcctgcacggaggaaagggtatcctctgggcaaggcacagccacccgccaggtcctccctctcaccacatccaggacagtggacgctgctccctgcctcttcctcagagtcctggggtcacacctctacctgcgcggctctcgggggccacccctctcagccccatccggctcctgagcagctttgtccccag

SEQ ID NO: 206 - DNA, 256 bp, Homo Sapiens
  misc_feature (1)..(1): n is a, c, g, or t
nactatgagaggatcgcatcaccatcaccatcacggatcctatttaggtgacactatagaatcgtcgacccacgcgtccgcgggatttgggtcgcggttcttgtttgtggatcgctgtgatcgtcacttgacaatgcagatcttcgtgaagactctgactggtaagaccatcaccctcgaggttgagcccagtgacaccatcgagaatgtcaaggcaaagatccaagataaggaaggcatccctcctgaccagcag

SEQ ID NO: 207 - DNA, 256 bp, Homo Sapiens
  misc_feature (2)..(2): n is a, c, g, or t
  misc_feature (4)..(4): n is a, c, g, or t
tnanctatgagaggatcgcatcaccatcaccatcacggatcctatttaggtgacactatagaatcgtcgacccacgcgtccgcgtatgttcactcgtctgccaccatcccattggatgaccccactttgctctttgccaatgcaggcatgaaccagtttaaacccattttcctgaacacaattgacccatctcaccccatggcaaagctgagcagagctgccaatacccagaagtgcatccgggctgggggcaaac

SEQ ID NO: 208 - DNA, 256 bp, Homo Sapiens
  misc_feature (1)..(1): n is a, c, g, or t
nactatgagaggatcgcatcaccatcaccatcacggatcctatttaggtgacactatagaatcgtcgacccacgcgtccgcccacgcgtccgcaaagatgtcggagcgaaaagtattaaacaaatactacccgccggactttgacccatcaaagatccccaaactcaagctccccaaagaccggcagtacgtggtgcggctgatggcccccttcaacatgaggtgtaagacgtgcggagaatacatctacaagggg

SEQ ID NO: 209 - DNA, 1246 bp, Homo Sapiens
  misc_feature (963)..(963): n is a, c, g, or t
  misc_feature (971)..(971): n is a, c, g, or t
  misc_feature (979)..(979): n is a, c, g, or t
  misc_feature (988)..(989): n is a, c, g, or t
  misc_feature (998)..(998): n is a, c, g, or t
  misc_feature (1001)..(1001): n is a, c, g, or t
  misc_feature (1020)..(1020): n is a, c, g, or t
  misc_feature (1030)..(1030): n is a, c, g, or t
  misc_feature (1038)..(1038): n is a, c, g, or t
  misc_feature (1058)..(1058): n is a, c, g, or t
  misc_feature (1060)..(1060): n is a, c, g, or t
  misc_feature (1065)..(1065): n is a, c, g, or t
  misc_feature (1070)..(1070): n is a, c, g, or t
  misc_feature (1076)..(1076): n is a, c, g, or t
  misc_feature (1085)..(1086): n is a, c, g, or t
  misc_feature (1090)..(1090): n is a, c, g, or t
  misc_feature (1093)..(1093): n is a, c, g, or t
  misc_feature (1096)..(1096): n is a, c, g, or t
  misc_feature (1106)..(1106): n is a, c, g, or t
  misc_feature (1113)..(1113): n is a, c, g, or t
  misc_feature (1115)..(1115): n is a, c, g, or t
  misc_feature (1122)..(1122): n is a, c, g, or t
  misc_feature (1128)..(1128): n is a, c, g, or t
  misc_feature (1130)..(1130): n is a, c, g, or t
  misc_feature (1132)..(1132): n is a, c, g, or t
  misc_feature (1144)..(1144): n is a, c, g, or t
  misc_feature (1146)..(1146): n is a, c, g, or t
  misc_feature (1152)..(1152): n is a, c, g, or t
  misc_feature (1157)..(1157): n is a, c, g, or t
  misc_feature (1160)..(1160): n is a, c, g, or t
  misc_feature (1166)..(1167): n is a, c, g, or t
  misc_feature (1175)..(1175): n is a, c, g, or t
  misc_feature (1177)..(1177): n is a, c, g, or t
  misc_feature (1180)..(1180): n is a, c, g, or t
  misc_feature (1185)..(1185): n is a, c, g, or t
  misc_feature (1194)..(1194): n is a, c, g, or t
  misc_feature (1197)..(1197): n is a, c, g, or t
  misc_feature (1215)..(1215): n is a, c, g, or t
  misc_feature (1218)..(1218): n is a, c, g, or t
  misc_feature (1225)..(1225): n is a, c, g, or t
  misc_feature (1240)..(1240): n is a, c, g, or t
tagagaaattactatgagaggatcgcatcaccatcaccatcacggatcctatttaggtgacactatagaatcgtcgacccacgcgtccggtgtttcagacttagctgacaagctctctactgatgatctgaactccctcattgctcatgcacatcgtcgtattgatcagctgaacagagagctggcagaacagaaggccaccgaaaagcagcacatcacgttagccttggagaaacaaaagctggaagaaaagcgggcatttgactctgcagtagcaaaagcattagaacatcacagaagtgaaatacaggctgaacaggacagaaagatagaagaagtcagagatgccatggaaaatgaaatgagaacccagcttcgccgacaggcagctgcccacactgatcacttgcgagatgtccttagggtacaagaacaggaattgaagtctgaatttgagcagaacctgtctgagaaactctctgaacaagaattacaatttcgtcgtctcagtcaagagcaagttgacaactttactctggatataaatactgcctatgccagactcagaggaatcgaacaggctgttcagagccatgcagttgctgaagaggaagccagaaaagcccaccaactctggctttcagtggaggcattaaagtacagcatgaagacctcatctgcagaaacacctactatcccgctgggtagtgcggttgaggccatcaaagccaactgttctgataatgaattcacccaagctttaaccgcagctatccctccagagtccctgacccgtggggtgtacagtgaagagacccttagagcccgtttctatgctgttcaaaaactggcccgaagggtagcaatgattgatgaaaccagaaatagcttggtaccagtacttcctctcctacctacagtccctgctcctattcccacctcagcaactgaagccgcccccanagctctgncctggagnattaaaccnnttttaattnacnggcatatgcttcccatggnattggagcanggggattngaactagcaccaaagtttgncnatccnctganggggantccaacaanngccnagnatngctgaagaanccccaangncctaaancaaacnantngggaaatctggncncttttnccccnccnaagaanngaaccccncnggnccccnagggggttnagnaaatttcaaagtcttttntgncaggaancccggtttaaaaggnttcccc

SEQ ID NO: 210 - DNA, 1200 bp, Homo Sapiens
  misc_feature (800)..(800): n is a, c, g, or t
  misc_feature (926)..(926): n is a, c, g, or t
  misc_feature (943)..(943): n is a, c, g, or t
  misc_feature (994)..(994): n is a, c, g, or t
  misc_feature (1051)..(1051): n is a, c, g, or t
  misc_feature (1058)..(1058): n is a, c, g, or t
  misc_feature (1063)..(1063): n is a, c, g, or t
  misc_feature (1068)..(1068): n is a, c, g, or t
  misc_feature (1070)..(1070): n is a, c, g, or t
  misc_feature (1079)..(1079): n is a, c, g, or t
  misc_feature (1081)..(1081): n is a, c, g, or t
  misc_feature (1083)..(1084): n is a, c, g, or t
  misc_feature (1094)..(1094): n is a, c, g, or t
  misc_feature (1101)..(1102): n is a, c, g, or t
  misc_feature (1104)..(1104): n is a, c, g, or t
  misc_feature (1106)..(1106): n is a, c, g, or t
  misc_feature (1110)..(1110): n is a, c, g, or t
  misc_feature (1120)..(1120): n is a, c, g, or t
  misc_feature (1126)..(1127): n is a, c, g, or t
  misc_feature (1152)..(1152): n is a, c, g, or t
  misc_feature (1156)..(1156): n is a, c, g, or t
  misc_feature (1169)..(1169): n is a, c, g, or t
  misc_feature (1173)..(1173): n is a, c, g, or t
  misc_feature (1194)..(1194): n is a, c, g, or t
  misc_feature (1196)..(1196): n is a, c, g, or t
  misc_feature (1198)..(1198): n is a, c, g, or t
tagagaaattactatgagaggatcgcatcaccatcaccatcacggatcctatttaggtgacactatagaatcgtcgacccacgcgtccgatccagcaagaactgcacaagaaacggagtcagccggagaacaaggagtggtcttccactgcctcacaggaggatggaggcccacaacgcgtctgccccattcaacttcaccctgccacccaactttggcaagcgccccacagacctggcactgagcgtcatcctggtgttcatgttgttcttcatcatgctctcgctgggctgcaccatggagttcagcaagatcaaggctcacttatggaagcctaaagggctggccatcgccctggtggcacagtatggcatcatgcccctcacggcctttgtgctgggcaaggtcttccggctgaagaacattgaggcactggccatcttggtctgtggctgctcacctggagggaacctgtccaatgtcttcagtctggccatgaagggggacatgaacctcagcattgtgatgaccacctgctccaccttctgtgcccttggcatgatgcctctcctcctgtacatctactccagggggatctatgatggggacctgaaggacaaggtgccctataaaggcatcgtgatatcactggtcctggttctcattccttgcaccatagggatcgtcctcaaatccaaacggccacaatacatgcgctatgtcatcaagggagggatgatcatcattctcttgtgcagtgtggccgtcacagttctctctgccatcaatgtggggaaaancatcatgtttgccatgacaccactcttgattgccacctcctccctgatgccttttattggctttctgctgggttatgttctctctgctctcttctgcctcaatggacggtgcaaacgcactgtcancatggaaactggatgcnaaaatgtccaactctgttccaccatcctcaatgtggcctttccacctgaantcattggaccacttttcttctttccccccctctaaatgattttccagcttggaaaanggcttcncctcnttgcnanttttggggncnannaaaattcaanactcccnngnanaaanaaaaatgatntacccnnctgcccaactgaaaaaaaaattccngaanttggggaaaaggncccnaaaaaggggaagaatgttccntngnaa

SEQ ID NO: 211 - DNA, 256 bp, Homo Sapiens
  misc_feature (2)..(2): n is a, c, g, or t
  misc_feature (97)..(98): n is a, c, g, or t
  misc_feature (106)..(106): n is a, c, g, or t
  misc_feature (109)..(109): n is a, c, g, or t
  misc_feature (115)..(115): n is a, c, g, or t
  misc_feature (120)..(120): n is a, c, g, or t
  misc_feature (124)..(125): n is a, c, g, or t
  misc_feature (130)..(130): n is a, c, g, or t
  misc_feature (133)..(133): n is a, c, g, or t
  misc_feature (142)..(142): n is a, c, g, or t
  misc_feature (144)..(144): n is a, c, g, or t
  misc_feature (148)..(148): n is a, c, g, or t
  misc_feature (156)..(156): n is a, c, g, or t
  misc_feature (162)..(162): n is a, c, g, or t
  misc_feature (166)..(166): n is a, c, g, or t
  misc_feature (168)..(168): n is a, c, g, or t
  misc_feature (179)..(179): n is a, c, g, or t
  misc_feature (210)..(210): n is a, c, g, or t
  misc_feature (231)..(232): n is a, c, g, or t
  misc_feature (237)..(237): n is a, c, g, or t
  misc_feature (242)..(242): n is a, c, g, or t
tnagaggagaattaactatgagaggatcgcatcaccatcaccatcacggatcctatttaggtgacactatagaatcgtcgacccacgcgtccggtannccgcagcntgngcacancgccngggnngaganaantggatcccntncgangcccgtgncccaantaangncgccgccccgnggccgccttggaggtccccctccccactaanacgcctctttgttagcaccannccccncccgnacgctctctgttcc

SEQ ID NO: 212 - DNA, 256 bp, Homo Sapiens
  misc_feature (1)..(1): n is a, c, g, or t
  misc_feature (5)..(5): n is a, c, g, or t
nactntgagaggatcgcatcaccatcaccatcacggatcctatttaggtgacactatagaatcgtcgacccacgcgtccgtgctggcttccaaggagttgcaccaggtggcgcacgacctggacgacgagctggcatgggttcaggagcggctgccactggccatgcagacagagcgaggcaacggtttgcaggcggtccagcagcacatcaaaaagaaccagggcctgcggcgggagatccaggcgcatgggccg

SEQ ID NO: 213 - DNA, 256 bp, Homo Sapiens
  misc_feature (2)..(2): n is a, c, g, or t
  misc_feature (4)..(4): n is a, c, g, or t
tnanaggagaattaactatgagaggatcgcatcaccatcaccatcacggatcctatttaggtgacactatagaatcgtcgacccacgcgtccggtcccggcagcggctgcagcgctctcgtcttctgcggctctcggtgccctctccttttcgtttccggaaacatggcctccggtgtggctgtctctgatggtgtcatcaaggtgttcaacgacatgaaggtgcgtaagtcttcaacgccagaggaggtgaagaa

SEQ ID NO: 214 - DNA, 256 bp, Homo Sapiens
ctgacccagccaagtccccaaagcccagcaatggggctggggtccccaatggagccctccgggagtccgggggctcaggcttccggtctccccacctgtggaagaagtccagcacgctgaccagcagccgcctagccaccggcgaggaggagggcggtggcagctccagcaagcgcttcctgcgctcttgctccgcctcctgcgttccccatggggccaaggacacggagtggaggtcagtcacgctgcctcggga

SEQ ID NO: 215 - DNA, 1423 bp, Homo Sapiens
  misc_feature (754)..(754): n is a, c, g, or t
  misc_feature (769)..(769): n is a, c, g, or t
  misc_feature (825)..(825): n is a, c, g, or t
  misc_feature (860)..(860): n is a, c, g, or t
  misc_feature (878)..(878): n is a, c, g, or t
  misc_feature (908)..(908): n is a, c, g, or t
  misc_feature (927)..(927): n is a, c, g, or t
  misc_feature (949)..(950): n is a, c, g, or t
  misc_feature (954)..(954): n is a, c, g, or t
  misc_feature (967)..(967): n is a, c, g, or t
  misc_feature (991)..(991): n is a, c, g, or t
  misc_feature (1000)..(1000): n is a, c, g, or t
  misc_feature (1002)..(1002): n is a, c, g, or t
  misc_feature (1018)..(1019): n is a, c, g, or t
  misc_feature (1036)..(1036): n is a, c, g, or t
  misc_feature (1038)..(1038): n is a, c, g, or t
  misc_feature (1049)..(1049): n is a, c, g, or t
  misc_feature (1063)..(1063): n is a, c, g, or t
  misc_feature (1068)..(1068): n is a, c, g, or t
  misc_feature (1071)..(1071): n is a, c, g, or t
  misc_feature (1077)..(1077): n is a, c, g, or t
  misc_feature (1079)..(1079): n is a, c, g, or t
  misc_feature (1082)..(1082): n is a, c, g, or t
  misc_feature (1085)..(1085): n is a, c, g, or t
  misc_feature (1095)..(1095): n is a, c, g, or t
  misc_feature (1097)..(1097): n is a, c, g, or t
  misc_feature (1103)..(1103): n is a, c, g, or t
  misc_feature (1105)..(1105): n is a, c, g, or t
  misc_feature (1109)..(1109): n is a, c, g, or t
  misc_feature (1113)..(1113): n is a, c, g, or t
  misc_feature (1117)..(1117): n is a, c, g, or t
  misc_feature (1121)..(1121): n is a, c, g, or t
  misc_feature (1129)..(1129): n is a, c, g, or t
  misc_feature (1132)..(1132): n is a, c, g, or t
  misc_feature (1140)..(1140): n is a, c, g, or t
  misc_feature (1142)..(1142): n is a, c, g, or t
  misc_feature (1145)..(1145): n is a, c, g, or t
  misc_feature (1150)..(1150): n is a, c, g, or t
  misc_feature (1158)..(1158): n is a, c, g, or t
  misc_feature (1160)..(1160): n is a, c, g, or t
  misc_feature (1168)..(1168): n is a, c, g, or t
  misc_feature (1172)..(1173): n is a, c, g, or t
  misc_feature (1185)..(1185): n is a, c, g, or t
  misc_feature (1187)..(1187): n is a, c, g, or t
  misc_feature (1189)..(1193): n is a, c, g, or t
  misc_feature (1197)..(1198): n is a, c, g, or t
  misc_feature (1202)..(1202): n is a, c, g, or t
  misc_feature (1206)..(1206): n is a, c, g, or t
  misc_feature (1211)..(1211): n is a, c, g, or t
  misc_feature (1214)..(1214): n is a, c, g, or t
  misc_feature (1217)..(1217): n is a, c, g, or t
  misc_feature (1222)..(1222): n is a, c, g, or t
  misc_feature (1232)..(1232): n is a, c, g, or t
  misc_feature (1243)..(1243): n is a, c, g, or t
  misc_feature (1257)..(1257): n is a, c, g, or t
  misc_feature (1266)..(1266): n is a, c, g, or t
  misc_feature (1274)..(1274): n is a, c, g, or t
  misc_feature (1278)..(1278): n is a, c, g, or t
  misc_feature (1282)..(1282): n is a, c, g, or t
  misc_feature (1284)..(1284): n is a, c, g, or t
  misc_feature (1287)..(1287): n is a, c, g, or t
  misc_feature (1289)..(1289): n is a, c, g, or t
  misc_feature (1292)..(1292): n is a, c, g, or t
  misc_feature (1299)..(1299): n is a, c, g, or t
  misc_feature (1302)..(1302): n is a, c, g, or t
  misc_feature (1307)..(1307): n is a, c, g, or t
  misc_feature (1311)..(1313): n is a, c, g, or t
  misc_feature (1315)..(1315): n is a, c, g, or t
  misc_feature (1320)..(1320): n is a, c, g, or t
  misc_feature (1324)..(1324): n is a, c, g, or t
  misc_feature (1330)..(1330): n is a, c, g, or t
  misc_feature (1334)..(1335): n is a, c, g, or t
  misc_feature (1338)..(1338): n is a, c, g, or t
  misc_feature (1341)..(1341): n is a, c, g, or t
  misc_feature (1345)..(1345): n is a, c, g, or t
  misc_feature (1347)..(1347): n is a, c, g, or t
  misc_feature (1349)..(1352): n is a, c, g, or t
  misc_feature (1364)..(1364): n is a, c, g, or t
  misc_feature (1373)..(1373): n is a, c, g, or t
  misc_feature (1375)..(1375): n is a, c, g, or t
  misc_feature (1378)..(1378): n is a, c, g, or t
  misc_feature (1387)..(1387): n is a, c, g, or t
  misc_feature (1389)..(1389): n is a, c, g, or t
  misc_feature (1392)..(1392): n is a, c, g, or t
  misc_feature (1404)..(1406): n is a, c, g, or t
  misc_feature (1408)..(1408): n is a, c, g, or t
  misc_feature (1410)..(1410): n is a, c, g, or t
  misc_feature (1417)..(1417): n is a, c, g, or t
aatagagaaattactatgagaggatcgcatcaccatcaccatcacggatcctatttaggtgacactatagaatcgtcgacccacgcgtccgcccacgcgtccggctcattggtgacacccccatcgacaccttcctcatggagatgcttgaggctccccatcaactggcctgagctcagacccagacgtggtgcttctcacactggaggagcacacatccaagagggactccaagccctggggcagggtggggggccatgttcccagaaccttgatggggtgagaagtacagggcagaaccaagaacataaaccctccaagggatctgcttgatatcccaagttggaagggaccccagatacctgtgaggactggttgtctctcttcggtggccttgagtctctgaatttgtcgggttctcccatgatttggggtgatttctcaccctctgtccttcccccagcacaaagcactggccttgcctccaggaccttgcttccttctcatcttgcctcattttgcttcccatctgaagagtggaaatggggaactcccccagaggtggatactggggggcaggcctcccaagctgatggacatgagagtagggccctgacaggccttcctcctctcaaacctggcagatgggggcctctctggaagagggaggggccctgtcactgtccagagtctctttttacacttcacctccttctgcagtcagactgaaatataaaaaaggtggtggtggtgntgaaggggctggtgnaaatgtaagaaccgatctgctattttttaatttcctgtgaggatagagacttgcanttagactcaaaagaagtactgtactttccagggtngactaaaaaaatgcccantggtggaagtggggtgttttgggaaaaggnaaggcccctgaaatggccntgtccctaaggcttctccaaannaatnagccttcccaagntttcccgccgccccccctaatttnttcctggtntnaatttggggaaaaggnncctggggcttgtaaagnanagggccccccnaagggaaggtttcnccaangtnaatccngnaangcntttctttaananttcctncnaccntggnaaanaaanaaaagctnggnaaaaagantnctnggccngaaaattnanggaagatngccnncccccaaaagtngngnnnnngganncaanaaantttgnccngtnccttntcttttgggncccttcccccnctaaaaaaaaaagnttttaaaanaaaccctntttntggncnaananaanaaaaaanaanaaaangggnnncnccccnaagnggatanatannaanaanctancncnnnnaaaacaaaacanaaacccttnanttnaacccggcncnggntttttgaaaaannntnanattttanaaaaaa

SEQ ID NO: 216 - DNA, 1233 bp, Homo Sapiens
  misc_feature (1)..(1): n is a, c, g, or t
  misc_feature (929)..(929): n is a, c, g, or t
  misc_feature (951)..(951): n is a, c, g, or t
  misc_feature (956)..(956): n is a, c, g, or t
  misc_feature (959)..(959): n is a, c, g, or t
  misc_feature (995)..(995): n is a, c, g, or t
  misc_feature (997)..(997): n is a, c, g, or t
  misc_feature (1009)..(1009): n is a, c, g, or t
  misc_feature (1060)..(1060): n is a, c, g, or t
  misc_feature (1074)..(1074): n is a, c, g, or t
  misc_feature (1105)..(1105): n is a, c, g, or t
  misc_feature (1110)..(1110): n is a, c, g, or t
  misc_feature (1115)..(1116): n is a, c, g, or t
  misc_feature (1123)..(1123): n is a, c, g, or t
  misc_feature (1134)..(1134): n is a, c, g, or t
  misc_feature (1142)..(1143): n is a, c, g, or t
  misc_feature (1154)..(1154): n is a, c, g, or t
  misc_feature (1158)..(1158): n is a, c, g, or t
  misc_feature (1160)..(1160): n is a, c, g, or t
  misc_feature (1171)..(1171): n is a, c, g, or t
  misc_feature (1175)..(1175): n is a, c, g, or t
  misc_feature (1195)..(1195): n is a, c, g, or t
  misc_feature (1204)..(1204): n is a, c, g, or t
  misc_feature (1207)..(1208): n is a, c, g, or t
  misc_feature (1215)..(1215): n is a, c, g, or t
  misc_feature (1217)..(1217): n is a, c, g, or t
  misc_feature (1227)..(1227): n is a, c, g, or t
  misc_feature (1232)..(1232): n is a, c, g, or t
naattagagaaattaactatgagaggatcgcatcaccatcaccatcacggatcctatttaggtgacactatagaatcgtcgacccacgcgtccggtggggacgcctctgcgcgaggaacgaggagctacgggcctgggcccggttattgccatgggcagcggctgccgcatcgaatgcatattcttcagcgagttccaccccacgctgggacccaagatcacctatcaggtccctgaagacttcatctcccgagagctgtttgacacagtccaagtgtacatcatcaccaagccagagctgcagaacaagcttatcattgtcacagctatggaaaagaagctgatcggctgtcctgtgtgcatcgaacacaagaagtacagccgcaatgctctcctcttcaacctgggcttcgtgtgtgatgcccaggccaagacctgcgccctcgagcccattgttaaaaagctggctggctatctgaccacactagagctagagagcagcttcgtgtccatggaggagagcaagcagaagttggtgcccatcatgaccatcttgctggaggagctaaatgcctcaggccggtgcactctgcccattgatgagtccaacaccatccacttgaaggtgattgagcagcggccagaccctccggtggcccaggagtatgatgtacctgtctttaccaaagacaaggaggatttcttcaactcacagtgggacctcactacacaacaaatcctgccctacattgatgggttccgccacatccagaagatttcagcagaggcagatgtggagctcaacctggtgcgcattgctatccagaacctgctgtactacggcgtttgtgacactggtgtccatcctccaggaagctgatccagttcgggcttatgaaaaacctcatcaggcgactacaaaagtatcntgtgcgggtgactcgggaagancaaanccncctgcccggtttttacaggctgccacagctatgaananatttgctgcaanaaagggcttgacctaccatgaactggatgaccgcttgaaaatgaccccaanatcttctttgctgnaaatgaggctggaatgactgatggaaccatngctgnggtanncccctanaagaggctggnctacggtnnaaggtgacctnattngnaaaaaaaatcntttnaaaaaaaaaaaaaaaaaaangggggcccnccnnaggggcnanaaactttttngggang

SEQ ID NO: 217 - DNA, 256 bp, Homo Sapiens
  misc_feature (2)..(2): n is a, c, g, or t
  misc_feature (4)..(4): n is a, c, g, or t
tnangaggagaattaactatgagaggatcgcatcaccatcaccatcacggatcctatttaggtgacactatagaatcgtcgacccacgcgtccgggaagaatttggtcaaaaaatgcttagaactctttactgaactggcggaagataaagagaactacaagaaattctatgagcagttctctaaaaacataaagcttggaatacacgaagactctcaaaatcggaagaagctttcagagctgttaaggtactaca

SEQ ID NO: 218 - DNA, 256 bp, Homo Sapiens
  misc_feature (7)..(7): n is a, c, g, or t
ttagagnaattactatgagaggatcgcatcaccatcaccatcacggatcctatttaggtgacactatagaatcgtcgacccacgcgtccgctccatctcgcccatctccagattcttcagaaagtgactgggaaactttggatcctagtgtcttagaggaccccaacttgaaagaaagggaacagctgggatcagaccagacaaatttgtttccaaaggactctgtcccctcagagagtcttccaattactgtaca

SEQ ID NO: 219 - DNA, 256 bp, Homo Sapiens
  misc_feature (19)..(19): n is a, c, g, or t
ttattaaagaggagaaatnactctgagaggatcgcatcaccatcaccatcacggatcctatttaggtgacactatagaatcgtcgacccacgcgtccgagatgacctctcccgtctacggcaccgacatgatggtgggcatcgggacgtcggatgtggacctggacaaataccgccacacgttctgcagcctgctgggcagggatgaggacagctggggcctctcctacacgggcctcctccaccacaagggcgac

SEQ ID NO: 220 - DNA, 256 bp, Homo Sapiens
  misc_feature (2)..(15): n is a, c, g, or t
  misc_feature (19)..(20): n is a, c, g, or t
  misc_feature (22)..(22): n is a, c, g, or t
  misc_feature (25)..(25): n is a, c, g, or t
  misc_feature (27)..(27): n is a, c, g, or t
  misc_feature (30)..(30): n is a, c, g, or t
  misc_feature (34)..(34): n is a, c, g, or t
  misc_feature (38)..(39): n is a, c, g, or t
  misc_feature (44)..(44): n is a, c, g, or t
  misc_feature (46)..(49): n is a, c, g, or t
  misc_feature (51)..(51): n is a, c, g, or t
  misc_feature (55)..(55): n is a, c, g, or t
  misc_feature (58)..(59): n is a, c, g, or t
  misc_feature (61)..(62): n is a, c, g, or t
  misc_feature (64)..(66): n is a, c, g, or t
  misc_feature (70)..(70): n is a, c, g, or t
  misc_feature (76)..(76): n is a, c, g, or t
  misc_feature (80)..(81): n is a, c, g, or t
  misc_feature (86)..(88): n is a, c, g, or t
  misc_feature (91)..(92): n is a, c, g, or t
  misc_feature (94)..(96): n is a, c, g, or t
  misc_feature (101)..(101): n is a, c, g, or t
  misc_feature (106)..(106): n is a, c, g, or t
  misc_feature (111)..(114): n is a, c, g, or t
  misc_feature (117)..(120): n is a, c, g, or t
  misc_feature (126)..(127): n is a, c, g, or t
  misc_feature (133)..(133): n is a, c, g, or t
  misc_feature (139)..(139): n is a, c, g, or t
  misc_feature (141)..(141): n is a, c, g, or t
  misc_feature (144)..(144): n is a, c, g, or t
  misc_feature (153)..(153): n is a, c, g, or t
  misc_feature (158)..(159): n is a, c, g, or t
  misc_feature (162)..(162): n is a, c, g, or t
  misc_feature (164)..(164): n is a, c, g, or t
  misc_feature (173)..(174): n is a, c, g, or t
  misc_feature (184)..(184): n is a, c, g, or t
  misc_feature (187)..(187): n is a, c, g, or t
  misc_feature (189)..(189): n is a, c, g, or t
  misc_feature (192)..(194): n is a, c, g, or t
  misc_feature (199)..(200): n is a, c, g, or t
  misc_feature (203)..(205): n is a, c, g, or t
  misc_feature (207)..(207): n is a, c, g, or t
  misc_feature (212)..(213): n is a, c, g, or t
  misc_feature (215)..(216): n is a, c, g, or t
  misc_feature (222)..(224): n is a, c, g, or t
  misc_feature (226)..(227): n is a, c, g, or t
  misc_feature (231)..(231): n is a, c, g, or t
  misc_feature (233)..(236): n is a, c, g, or t
  misc_feature (239)..(239): n is a, c, g, or t
  misc_feature (243)..(243): n is a, c, g, or t
  misc_feature (245)..(245): n is a, c, g, or t
  misc_feature (249)..(251): n is a, c, g, or t
  misc_feature (254)..(255): n is a, c, g, or t
tnnnnnnnnnnnnnnatgnncnggngnctnctangggnnttttntnnnntngctntcnncnngnnngacntgtttntcgnnaatgnnnttnntnnncctcntcccntcccnnnnttnnnnctctcnnaccgcnactaanancangccagggcnaagcnncgngntagccgggnncgcttttggnctngnggnnngtggnnggnnntntgttnncnncgatannncnncaantnnnngangatnanttannnctnng

SEQ ID NO: 221 - DNA, 256 bp, Homo Sapiens
  misc_feature (3)..(4): n is a, c, g, or t
ttnnctatgagaggatcgcatcaccatcaccatcacggatcctatttaggtgacactatagaatcgtcgacccacgcgtccgggccgcgcgggtggctgagcagcggcctggtgcgctcgcttagcgggcgacggaatcagacggacgtggacgcccccggagtggaagccgaagcaggagttgttgttgctgaggggctgccgcagccgccgcgagcctccggacagacgccagagcgaggagggcgctacgcga

SEQ ID NO: 222 - DNA, 256 bp, Homo Sapiens
ggacgcgtgggcggacgcgtgggcggacgcgtggggagcgcgcggagccggccatgggcaagtcagcttccaaacagtttcataatgaggtcctgaaggcccacaatgagtaccggcagaagcacggcgtccccccactgaagctctgcaagaacctcaaccgggaggctcaacagtattctgaggccctggccagcacgaggatcctcaagcacagcccggagtccagccgtggccagtgtggggagaaccttgc

SEQ ID NO: 223 - DNA, 256 bp, Homo Sapiens
  misc_feature (3)..(3): n is a, c, g, or t
  misc_feature (9)..(9): n is a, c, g, or t
  misc_feature (122)..(122): n is a, c, g, or t
ccntagagnaaataactatgagaggatcgcatcaccatcaccatcacggatcctatttaggtgacactatagaatcgtcgacccacgcggtccggaattacacaggagacttttgatgctgnattacaagaaaaagccaaacgatatcacatggatgccagtggtgaggctgtaagcgaaactcttcagtttaaagctcaagatctcttaagggcagtcccaagatccagagcagagatgtatgatgacgtccaca

SEQ ID NO: 224 - DNA, 256 bp, Homo Sapiens
  misc_feature (2)..(4): n is a, c, g, or t
tnnnaggagaattaactatgagaggatcgcatcaccatcaccatcacggatcctatttaggtgacactatagaatcgtcgacccacgcgtccgtagctattaattcaaaaaaggaggaactcaatcaatctgtaaatcgtgtgaaagaacttgagcttgaattagagtctgtcaaagcccagtctttggcaataacaaaacaaaaccatatgctgaatgaaaaggttaaagagatgagtgattattcactactaaa

SEQ ID NO: 225 - DNA, 256 bp, Homo Sapiens
  misc_feature (1)..(1): n is a, c, g, or t
naactatgagaggatcgcatcaccatcaccatcacggatcctatttaggtgacactatagaatcgtcgacccacgcgtccgcggacgcgtgggcggacgcgtgggcggacgcgtgggccgcctccgagcccgccgccacatcctctgagcagaagatggctgtgccacccacgtatgccgatcttggcaaatctgccagggatgtcttcaccaagggctatggatttggcttaataaagcttgatttgaaaacaaa

SEQ ID NO: 226 - DNA, 1454 bp, Homo Sapiens
  misc_feature (13)..(13): n is a, c, g, or t
  misc_feature (59)..(59): n is a, c, g, or t
  misc_feature (459)..(459): n is a, c, g, or t
  misc_feature (467)..(467): n is a, c, g, or t
  misc_feature (603)..(603): n is a, c, g, or t
  misc_feature (639)..(639): n is a, c, g, or t
  misc_feature (664)..(664): n is a, c, g, or t
  misc_feature (682)..(682): n is a, c, g, or t
  misc_feature (727)..(727): n is a, c, g, or t
  misc_feature (755)..(755): n is a, c, g, or t
  misc_feature (758)..(758): n is a, c, g, or t
  misc_feature (771)..(772): n is a, c, g, or t
  misc_feature (775)..(775): n is a, c, g, or t
  misc_feature (784)..(784): n is a, c, g, or t
  misc_feature (798)..(798): n is a, c, g, or t
  misc_feature (813)..(813): n is a, c, g, or t
  misc_feature (833)..(835): n is a, c, g, or t
  misc_feature (839)..(839): n is a, c, g, or t
  misc_feature (842)..(842): n is a, c, g, or t
  misc_feature (848)..(848): n is a, c, g, or t
  misc_feature (858)..(858): n is a, c, g, or t
  misc_feature (865)..(865): n is a, c, g, or t
  misc_feature (869)..(869): n is a, c, g, or t
  misc_feature (873)..(873): n is a, c, g, or t
  misc_feature (881)..(881): n is a, c, g, or t
  misc_feature (891)..(891): n is a, c, g, or t
  misc_feature (895)..(895): n is a, c, g, or t
  misc_feature (926)..(926): n is a, c, g, or t
  misc_feature (930)..(930): n is a, c, g, or t
  misc_feature (946)..(946): n is a, c, g, or t
  misc_feature (948)..(948): n is a, c, g, or t
  misc_feature (953)..(953): n is a, c, g, or t
  misc_feature (962)..(962): n is a, c, g, or t
  misc_feature (966)..(966): n is a, c, g, or t
  misc_feature (969)..(969): n is a, c, g, or t
  misc_feature (972)..(973): n is a, c, g, or t
  misc_feature (975)..(975): n is a, c, g, or t
  misc_feature (977)..(977): n is a, c, g, or t
  misc_feature (985)..(985): n is a, c, g, or t
  misc_feature (988)..(988): n is a, c, g, or t
  misc_feature (993)..(993): n is a, c, g, or t
  misc_feature (1001)..(1002): n is a, c, g, or t
  misc_feature (1004)..(1005): n is a, c, g, or t
  misc_feature (1008)..(1008): n is a, c, g, or t
  misc_feature (1011)..(1011): n is a, c, g, or t
  misc_feature (1016)..(1016): n is a, c, g, or t
  misc_feature (1025)..(1026): n is a, c, g, or t
  misc_feature (1030)..(1030): n is a, c, g, or t
  misc_feature (1033)..(1033): n is a, c, g, or t
  misc_feature (1040)..(1040): n is a, c, g, or t
  misc_feature (1049)..(1051): n is a, c, g, or t
  misc_feature (1053)..(1053): n is a, c, g, or t
  misc_feature (1057)..(1057): n is a, c, g, or t
  misc_feature (1060)..(1062): n is a, c, g, or t
  misc_feature (1075)..(1075): n is a, c, g, or t
  misc_feature (1078)..(1079): n is a, c, g, or t
  misc_feature (1082)..(1082): n is a, c, g, or t
  misc_feature (1086)..(1086): n is a, c, g, or t
  misc_feature (1088)..(1088): n is a, c, g, or t
  misc_feature (1096)..(1097): n is a, c, g, or t
  misc_feature (1100)..(1101): n is a, c, g, or t
  misc_feature (1107)..(1107): n is a, c, g, or t
  misc_feature (1114)..(1115): n is a, c, g, or t
  misc_feature (1118)..(1118): n is a, c, g, or t
  misc_feature (1123)..(1124): n is a, c, g, or t
  misc_feature (1128)..(1128): n is a, c, g, or t
  misc_feature (1134)..(1134): n is a, c, g, or t
  misc_feature (1141)..(1142): n is a, c, g, or t
  misc_feature (1146)..(1147): n is a, c, g, or t
  misc_feature (1149)..(1149): n is a, c, g, or t
  misc_feature (1152)..(1152): n is a, c, g, or t
  misc_feature (1155)..(1157): n is a, c, g, or t
  misc_feature (1164)..(1164): n is a, c, g, or t
  misc_feature (1173)..(1173): n is a, c, g, or t
  misc_feature (1175)..(1177): n is a, c, g, or t
  misc_feature (1182)..(1182): n is a, c, g, or t
  misc_feature (1185)..(1186): n is a, c, g, or t
  misc_feature (1194)..(1194): n is a, c, g, or t
  misc_feature (1196)..(1196): n is a, c, g, or t
  misc_feature (1201)..(1202): n is a, c, g, or t
  misc_feature (1205)..(1205): n is a, c, g, or t
  misc_feature (1209)..(1209): n is a, c, g, or t
  misc_feature (1216)..(1216): n is a, c, g, or t
  misc_feature (1219)..(1219): n is a, c, g, or t
  misc_feature (1223)..(1223): n is a, c, g, or t
  misc_feature (1225)..(1225): n is a, c, g, or t
  misc_feature (1229)..(1230): n is a, c, g, or t
  misc_feature (1237)..(1237): n is a, c, g, or t
  misc_feature (1240)..(1240): n is a, c, g, or t
  misc_feature (1251)..(1251): n is a, c, g, or t
  misc_feature (1255)..(1257): n is a, c, g, or t
  misc_feature (1269)..(1269): n is a, c, g, or t
  misc_feature (1272)..(1272): n is a, c, g, or t
  misc_feature (1274)..(1275): n is a, c, g, or t
  misc_feature (1286)..(1286): n is a, c, g, or t
  misc_feature (1290)..(1290): n is a, c, g, or t
  misc_feature (1292)..(1292): n is a, c, g, or t
  misc_feature (1295)..(1296): n is a, c, g, or t
  misc_feature (1298)..(1298): n is a, c, g, or t
  misc_feature (1300)..(1300): n is a, c, g, or t
  misc_feature (1306)..(1307): n is a, c, g, or t
  misc_feature (1311)..(1313): n is a, c, g, or t
  misc_feature (1315)..(1315): n is a, c, g, or t
  misc_feature (1318)..(1318): n is a, c, g, or t
  misc_feature (1322)..(1323): n is a, c, g, or t
  misc_feature (1325)..(1325): n is a, c, g, or t
  misc_feature (1331)..(1331): n is a, c, g, or t
  misc_feature (1333)..(1333): n is a, c, g, or t
  misc_feature (1345)..(1345): n is a, c, g, or t
  misc_feature (1350)..(1350): n is a, c, g, or t
  misc_feature (1354)..(1355): n is a, c, g, or t
  misc_feature (1358)..(1358): n is a, c, g, or t
  misc_feature (1368)..(1370): n is a, c, g, or t
  misc_feature (1374)..(1375): n is a, c, g, or t
  misc_feature (1386)..(1387): n is a, c, g, or t
  misc_feature (1391)..(1391): n is a, c, g, or t
  misc_feature (1398)..(1398): n is a, c, g, or t
  misc_feature (1403)..(1403): n is a, c, g, or t
  misc_feature (1405)..(1405): n is a, c, g, or t
  misc_feature (1407)..(1407): n is a, c, g, or t
  misc_feature (1413)..(1413): n is a, c, g, or t
  misc_feature (1417)..(1417): n is a, c, g, or t
  misc_feature (1429)..(1432): n is a, c, g, or t
  misc_feature (1435)..(1436): n is a, c, g, or t
  misc_feature (1448)..(1448): n is a, c, g, or t
aagaggaaattanctatgagaggatcgcatcaccatcaccatcacgggatcctatttangtgacactatagaatcgtcgacccacgcgtccggggggaatttgtcctgtaaaatagacttccagagctcttttgccccctctgctcccatgcaccctccccttccaagtcctttagcaaggcctggatgtttagggagaaagtggtccaaggctgctgacaagagggaccaaagggggtgctgggttcccagggagcagggatgtttaattactatgtcatgtgcaatgttgttttaggccaacccttgccccaagcccagtctcttctccctccccaccatgtccagacctcccaaatggttcttgtgcatctgttggagaagtcaagggagtagggagaagggccccaaggatgggcccaggttaggtgaagagtaagatgtgagctgaactcctcnaactgaanagacccacacttggtcacattctctcacgctgccttcaggatccccagcccccaactcttcttcctgaggatggaaatccactccagccccactaggactgatgtgggtgccatacaggcaggagcagcccaccangaaagtgtaaggagggagctgaactccccagagtanctggaccacaagagacttgggtcanagctgatttcaaccccanaattgtctctcgggttcaccctactcttctgaaaatgaaaatttntttggggcccttggtaaccgatagcggnacnaactccaaggcanntgnggacttgantccattcctaagcngacctcttttttgtnccccctcaagcctcaagggnnnctcnaancccctncttaaatacnccttggntgantggngacccctnaagccccaancatncattctttcccaaaaacccttcctttccccntccntccccccaccccttancntacanccaaagtgnaccnaantcnntntntaaatttnccnagaanggaaattnncnnccnccnccccngggggggannccancanggggctnaattttaannncngttnctnnnaaataggaaaccnaannagnactncntgtccctnnganntaccangcttttnntanccccnncacnaatcgnggggggnngaanntntanatnnncaccccnctccccttntnnnaaatnccnngtcaaaancnccccnnttnccanaaaaccncanaaantnaaannccgcctnaanataaggggagncctnnngaaagaaaatanaananntattacaatgncctnanaannancntaaaannaaannngnatnatanncnttcccntnaaaaataaagcntcttntaannggnggaaaaaacnnngggnngaaaaaatatnnagantcttctntttantntnaaaacntttntataaatagaannnnttnnaaaaaatataanaaaata

SEQ ID NO: 227 - DNA, 256 bp, Homo Sapiens
  misc_feature (10)..(10): n is a, c, g, or t
  misc_feature (53)..(53): n is a, c, g, or t
  misc_feature (75)..(75): n is a, c, g, or t
tcgagaaatntaaaaaattatttgctttgtgagcggatacaatatatagattnattgtgagcggataacaatttncacagaattattaaagaggagaaattaactatgagaggatcgcatcaccatcaccatcacggatcctatttaggtgacactatagaatcgtcgacccacgcgtccgagcctttcagcaacaaaggccagacgctggtggtgcagttcacggtgaaacatgagcagaacatcgactgtgggg

SEQ ID NO: 228 - DNA, 1200 bp, Homo Sapiens
  misc_feature (1)..(1): n is a, c, g, or t
  misc_feature (3)..(3): n is a, c, g, or t
  misc_feature (977)..(977): n is a, c, g, or t
  misc_feature (997)..(998): n is a, c, g, or t
  misc_feature (1049)..(1049): n is a, c, g, or t
  misc_feature (1055)..(1055): n is a, c, g, or t
  misc_feature (1058)..(1059): n is a, c, g, or t
  misc_feature (1064)..(1064): n is a, c, g, or t
  misc_feature (1070)..(1070): n is a, c, g, or t
  misc_feature (1075)..(1075): n is a, c, g, or t
  misc_feature (1082)..(1082): n is a, c, g, or t
  misc_feature (1085)..(1086): n is a, c, g, or t
  misc_feature (1091)..(1091): n is a, c, g, or t
  misc_feature (1094)..(1094): n is a, c, g, or t
  misc_feature (1097)..(1097): n is a, c, g, or t
  misc_feature (1107)..(1107): n is a, c, g, or t
  misc_feature (1111)..(1111): n is a, c, g, or t
  misc_feature (1116)..(1116): n is a, c, g, or t
  misc_feature (1125)..(1125): n is a, c, g, or t
  misc_feature (1129)..(1130): n is a, c, g, or t
  misc_feature (1133)..(1135): n is a, c, g, or t
  misc_feature (1144)..(1144): n is a, c, g, or t
  misc_feature (1148)..(1148): n is a, c, g, or t
  misc_feature (1151)..(1152): n is a, c, g, or t
  misc_feature (1160)..(1160): n is a, c, g, or t
  misc_feature (1165)..(1165): n is a, c, g, or t
  misc_feature (1176)..(1176): n is a, c, g, or t
  misc_feature (1197)..(1198): n is a, c, g, or t
nanttagagagaattactatgagaggatcgcatcaccatcaccatcacggatcctatttaggtgacactatagaatcgtcgacccacgcgtccgagcatggcggacgcagctcctcaactaggcaagaggaagcgcgaattggacgtggaggaggcccacgccgccagcacagaggaaaaggaggcaggagttggaaatggtacctgtgctcctgtccgcttaccgttctccggcttcagactgcagaaggtgctgagggagtctgcgcgggacaaaatcattttcctacacgggaaggtgaatgaggcctctggggatggggatggagaggatgccgttgtgatcctggagaagacgccatttcaggtggaacaggtggctcagctcctgacgggcagccctgagctccaattgcagttctccaatgatatctacagcacctatcacttgttccctccaagacaactgaatgatgtaaagacgaccgtggtttaccctgccacagagaaacacctgcagaagtacctgcgccaggacctccgcctgatccgagagacgggagatgactacaggaatattactttaccccacctggagtcccagagcctcagcatccagtgggtgtataacattctcgacaagaaggctgaagcggaccggattgttttcgagaacccagatccctctgatggttttgtcctcatccctgacctcaagtggaaccaacagcagctcgatgacttgtacttgatcgccatctgccatcgccggggcatcagatccctacgcgaccttactccggagcacttgccgctgctcaggaacatcctccaccaggggcaggaggccatcctgcagcgctaccggatgaagggagaccatctgcgagtatacctgcactacctgcccctcctactaccacctgcatgtgcacttcaccgccctgggcttcgaggcccccggctcaggcgtggancgggcccacctgctggctgnngtgatcgaaaacttggaagtggggaccttaggcactaccagcagcggaagnctcacnttnnccctncagggntgaanaaccccntgnntcaanctnttnggagggaggntcanccaancttgaattnactnncgnnnaaaaaaccnaaanttnngggaattnggggnaaaaatggggnaaaaaaattttttttttcccnngg

SEQ ID NO: 229 - DNA, 256 bp, Homo Sapiens
  misc_feature (16)..(16): n is a, c, g, or t
  misc_feature (252)..(252): n is a, c, g, or t
  misc_feature (254)..(254): n is a, c, g, or t
ttattaaagaggaganttaactatgagaggatcgcataccatcaccatcacggatcctatttaggtgacactatagaatcgtcgacccacgcgtccgcccacgcgtccgctttcctgcagacctattcccacgaggtctccctcactgcggactcgcggaagagccacctgattttcccccagcccaactatgcggacacgctcatcagccaggagagctgtgagaaaaaggattttttatcagcgcctcantntc

SEQ ID NO: 230 - DNA, 1200 bp, Homo Sapiens
  misc_feature (14)..(14): n is a, c, g, or t
  misc_feature (953)..(953): n is a, c, g, or t
  misc_feature (963)..(963): n is a, c, g, or t
  misc_feature (985)..(985): n is a, c, g, or t
  misc_feature (987)..(987): n is a, c, g, or t
  misc_feature (1015)..(1015): n is a, c, g, or t
  misc_feature (1021)..(1021): n is a, c, g, or t
  misc_feature (1023)..(1023): n is a, c, g, or t
  misc_feature (1026)..(1026): n is a, c, g, or t
  misc_feature (1037)..(1037): n is a, c, g, or t
  misc_feature (1045)..(1045): n is a, c, g, or t
  misc_feature (1050)..(1050): n is a, c, g, or t
  misc_feature (1060)..(1060): n is a, c, g, or t
  misc_feature (1069)..(1069): n is a, c, g, or t
  misc_feature (1074)..(1074): n is a, c, g, or t
  misc_feature (1081)..(1081): n is a, c, g, or t
  misc_feature (1088)..(1088): n is a, c, g, or t
  misc_feature (1102)..(1102): n is a, c, g, or t
  misc_feature (1106)..(1106): n is a, c, g, or t
  misc_feature (1114)..(1114): n is a, c, g, or t
  misc_feature (1116)..(1116): n is a, c, g, or t
  misc_feature (1122)..(1122): n is a, c, g, or t
  misc_feature (1126)..(1126): n is a, c, g, or t
  misc_feature (1133)..(1133): n is a, c, g, or t
  misc_feature (1135)..(1135): n is a, c, g, or t
  misc_feature (1137)..(1138): n is a, c, g, or t
  misc_feature (1142)..(1142): n is a, c, g, or t
  misc_feature (1146)..(1146): n is a, c, g, or t
  misc_feature (1158)..(1158): n is a, c, g, or t
  misc_feature (1161)..(1161): n is a, c, g, or t
  misc_feature (1163)..(1163): n is a, c, g, or t
  misc_feature (1168)..(1168): n is a, c, g, or t
  misc_feature (1170)..(1171): n is a, c, g, or t
  misc_feature (1174)..(1174): n is a, c, g, or t
aatagagaaattanctatgagaggatcgcatcaccatcaccatcacggatcctatttaggtgacactatagaatcgtcgacccacgcgtccgatgctctgcactcagctctggggggcacaaagaagaaaaagaagactattgtgactgatgttttccaggggtccatgaggatcttcactaaaaagcttccccatcctgatctgccagcagaagaaaaagagcagttgctccataatgacgagtaccaggagacaatggtggagtccacttttatgtacctgacgctggaccttcctactgcccccctctacaaggacgagaaggagcagctcatcattccccaagtgccactcttcaacatcctggctaagttcaatggcatcactgagaaggaatataagacttacaaggagaactttctgaagcgcttccagcttaccaagttgcctccatatctaatcttttgtatcaagagattcactaagaacaacttctttgttgagaagaatccaactattgtcaatttccctattacaaatgtggatctgagagaatacttgtctgaagaagtacaagcagtacacaagaataccacctatgacctcattgccaacatcgtgcatgacggcaagccctccgagggctcctaccggatccacgtgcttcatcatgggacaggcaaatggtatgaattacaagacctccaggtgactgacatccttccccagatgatcacactgtcagaggcttacattcagatttggaagaggcgagataatgatgaaaccaaccagcagggggcttgaaggaggcgtctagggctttgctcccaagggctgtggctgatgatggtaaataagaacacagaagctgtagctgaacacaggctggctggtgggcttcctaggccagcccagcttggtatgggttctggctacaccagagcaccangagcccactngcctgggatggccccccactgncnctcagctgttctttgatcatttttttcnaaatgnangcnccttcccccangcattganctccntctagcttcngcagggcanaaccntccccanagggggnacttatgtcttganatcngggaatantngaaaanaaanattcctncnanntcancctngggattttggancancnaaaancnntancttcccctgtaaaggggggaatttcc

SEQ ID NO: 231 - DNA, 256 bp, Homo Sapiens
  misc_feature (1)..(3): n is a, c, g, or t
nnnctatgagaggtcgcatcaccatcaccatcacggatcctatttaggtgacactatagaatcgtcgacccacgcgtccgaagacagggaagactatgtgccctacactggagaaaaaaaagggaaaatatttatccccaaacagaaacctgtacagacttttacagaagaaaaagtgtctcttgatccagaattagaagaagctttgacaagtgcttctgatacagaattgtgtgacctcgcagcaattcttggg

SEQ ID NO: 232 - DNA, 256 bp, Homo Sapiens
  misc_feature (1)..(1): n is a, c, g, or t
nactatgagaggatcgcatcaccatcaccatcacggatcctatttaggtgacactatagaatcgtcgacccacgcgtccggtctggacaaccgcgactccttcgaggaggtgcagcggctcaggcagcagatcctcgacaccaagtcttgcctcaagaacaaaaccaaggagaacgtggacgtgcccctggtcatctgcggcaacaagggtgaccgcgacttctaccgcgaggtggaccagcgcgagatcgagcag

SEQ ID NO: 233 - DNA, 1203 bp, Homo Sapiens
  misc_feature (2)..(10): n is a, c, g, or t
  misc_feature (892)..(892): n is a, c, g, or t
  misc_feature (901)..(901): n is a, c, g, or t
  misc_feature (925)..(925): n is a, c, g, or t
  misc_feature (969)..(969): n is a, c, g, or t
  misc_feature (971)..(971): n is a, c, g, or t
  misc_feature (978)..(978): n is a, c, g, or t
  misc_feature (984)..(984): n is a, c, g, or t
  misc_feature (987)..(987): n is a, c, g, or t
  misc_feature (996)..(996): n is a, c, g, or t
  misc_feature (1008)..(1008): n is a, c, g, or t
  misc_feature (1017)..(1017): n is a, c, g, or t
  misc_feature (1020)..(1020): n is a, c, g, or t
  misc_feature (1026)..(1026): n is a, c, g, or t
  misc_feature (1029)..(1029): n is a, c, g, or t
  misc_feature (1033)..(1033): n is a, c, g, or t
  misc_feature (1036)..(1036): n is a, c, g, or t
  misc_feature (1043)..(1044): n is a, c, g, or t
  misc_feature (1046)..(1046): n is a, c, g, or t
  misc_feature (1092)..(1092): n is a, c, g, or t
  misc_feature (1097)..(1097): n is a, c, g, or t
  misc_feature (1101)..(1102): n is a, c, g, or t
  misc_feature (1109)..(1109): n is a, c, g, or t
  misc_feature (1135)..(1135): n is a, c, g, or t
  misc_feature (1140)..(1140): n is a, c, g, or t
  misc_feature (1144)..(1144): n is a, c, g, or t
  misc_feature (1156)..(1156): n is a, c, g, or t
  misc_feature (1160)..(1160): n is a, c, g, or t
  misc_feature (1162)..(1162): n is a, c, g, or t
  misc_feature (1171)..(1172): n is a, c, g, or t
  misc_feature (1174)..(1174): n is a, c, g, or t
  misc_feature (1185)..(1185): n is a, c, g, or t
  misc_feature (1193)..(1193): n is a, c, g, or t
  misc_feature (1198)..(1199): n is a, c, g, or t
tnnnnnnnnnaatagagaaattactatgagaggatcgcatcaccatcaccattcacggatcctatttaggtgacactatagaatcgtcgacccacgcgtccgcccacgcgtccggggcctcgctgcaggacctgaagactgtggtcatcgccaagacccccgggacgggaggcagcccccagggctcctttgcggatggccagcctgccgagcgcagggccagcaatgaccagcgtccccaggaggtcccagcagaggctctggccccggccccagtggaagtcccagctccagcccctgcagcagcctcagcctcaggcccagcgaagactccggccccagcagaggcctcaacttcagctttggtcccagaggagacgccagtggaagctccagccccacccccagccgaggcccctgcccagtacccgagtgagcacctcatccaggccacctcggaggagaatcagatcccctcgcacttgcctgcctgcccgtcgctccggcacgtcgccagcctgcggggcagcgccatcatcgagctcttccacagcagcattgctgaggttgaaaacgaggagctgaggcacctcatgtggtcctcggtggtgttctaccagaccccagggctggaggtgactgcctgcgtgctgctctccaccaaggctgtgtactttgtgctccacgacggcctccgccgctacttctcagagccactgcaggatttctggcatcagaaaaacaccgactacaacaacagccctttccacatctcccagtgcttcgtgctaaagcttagtgacctgcagtcagtcaatgtggggcttttcgaccagcatttccggctgacgggttccaccccgatgcaggtggtcacgtgcttgacgcgggnacagctacntgacgcactgcttcctccagcacntcatggtcgtgctgtcctctctggaacgcacgccctccccggancntgttganaagganttntactccgantttgggaacaanacccagggnaanatgganaantacnagntgatccnntntagtcgggtaaggtttacttaccccagtgaggaagaaattgggganctgantttnnctgtggnccaaaaaatggttgaaccaaaaaggncccancctnaaatttttgttntaantngaggctttnnangggggatgccnccctgggngttgnngggc

SEQ ID NO: 234 - DNA, 1211 bp, Homo Sapiens
  misc_feature (1)..(2): n is a, c, g, or t
  misc_feature (16)..(16): n is a, c, g, or t
  misc_feature (950)..(950): n is a, c, g, or t
  misc_feature (971)..(971): n is a, c, g, or t
  misc_feature (975)..(975): n is a, c, g, or t
  misc_feature (980)..(980): n is a, c, g, or t
  misc_feature (990)..(990): n is a, c, g, or t
  misc_feature (1007)..(1007): n is a, c, g, or t
  misc_feature (1018)..(1018): n is a, c, g, or t
  misc_feature (1024)..(1024): n is a, c, g, or t
  misc_feature (1032)..(1032): n is a, c, g, or t
  misc_feature (1034)..(1034): n is a, c, g, or t
  misc_feature (1036)..(1036): n is a, c, g, or t
  misc_feature (1086)..(1086): n is a, c, g, or t
  misc_feature (1088)..(1088): n is a, c, g, or t
  misc_feature (1104)..(1104): n is a, c, g, or t
  misc_feature (1108)..(1108): n is a, c, g, or t
  misc_feature (1114)..(1114): n is a, c, g, or t
  misc_feature (1119)..(1119): n is a, c, g, or t
  misc_feature (1122)..(1122): n is a, c, g, or t
  misc_feature (1126)..(1126): n is a, c, g, or t
  misc_feature (1136)..(1137): n is a, c, g, or t
  misc_feature (1139)..(1139): n is a, c, g, or t
  misc_feature (1141)..(1142): n is a, c, g, or t
  misc_feature (1144)..(1144): n is a, c, g, or t
  misc_feature (1159)..(1159): n is a, c, g, or t
  misc_feature (1161)..(1161): n is a, c, g, or t
  misc_feature (1165)..(1165): n is a, c, g, or t
  misc_feature (1167)..(1167): n is a, c, g, or t
  misc_feature (1170)..(1170): n is a, c, g, or t
  misc_feature (1178)..(1178): n is a, c, g, or t
  misc_feature (1184)..(1185): n is a, c, g, or t
  misc_feature (1187)..(1190): n is a, c, g, or t
  misc_feature (1192)..(1192): n is a, c, g, or t
  misc_feature (1201)..(1201): n is a, c, g, or t
  misc_feature (1203)..(1203): n is a, c, g, or t
  misc_feature (1207)..(1207): n is a, c, g, or t
nnaatagagaaattanctatgagaggatcgcatcaccatcaccatcacggatcctatttaggtgacactatagaatcgtcgacccacgcgtccgccaccgccgaggaaaaccgtgtgctattagccatggtcaaccccaccgtgttcttcgacattgccgtcgacggcgagcccttgggccgcgtctcctttgagctgtttgcagacaaggtcccaaagacagcagaaaattttcgtgctctgagcactggagagaaaggatttggttataagggttcctgctttcacagaattattccagggtttatgtgtcagggtggtgacttcacacgccataatggcactggtggcaagtccatctatggggagaaatttgaagatgagaacttcatcctaaagcatacgggtcctggcatcttgtccatggcaaatgctggacccaacacaaatggttcccagtttttcatctgcactgccaagactgagtggttggatggcaagcatgtggtgtttggcaaagtgaaagaaggcatgaatattgtggaggccatggagcgctttgggtccaggaatggcaagaccagcaagaagatcaccattgctgactgtggacaactcgaataagtttgacttgtgttttatcttaaccaccagatcattccttctgtagctcaggagagcacccctccaccccatttgctcgcagtatcctagaatctttgtgctctcgctgcagttccctttgggttccatgttttccttgttccctcccatgcctagctggattgcagagttaagtttatgattatgaaataaaaactaaataacaattgtcctcgtttgagttaagagtgttgatgtaggctttattttaagcagtaatgggttacttctgaaacatcacttgtttgcttaattctacacagtacttagatttttttttactttcnagtcccaggaagtgtcaatgnttgnttgangtggaatatngaaaatgtaggcagcanctgggcatggnggctcnctgtctgnangnattacctgaggcaaaaaacccctgagggtagaatcaaaatcccctgggcnanaaatggaaccctgtcnctcnaaaaanaatanccnggcngggggggcanncnanncnaactaattggagctnantggnanatncttgaccnaaaggnncnnnnanctgcccttnanaccngggg

SEQ ID NO: 235 - DNA, 1200 bp, Homo Sapiens
  misc_feature (2)..(2): n is a, c, g, or t
  misc_feature (9)..(9): n is a, c, g, or t
  misc_feature (864)..(864): n is a, c, g, or t
  misc_feature (890)..(892): n is a, c, g, or t
  misc_feature (894)..(894): n is a, c, g, or t
  misc_feature (900)..(901): n is a, c, g, or t
  misc_feature (903)..(903): n is a, c, g, or t
  misc_feature (906)..(911): n is a, c, g, or t
  misc_feature (913)..(920): n is a, c, g, or t
  misc_feature (922)..(922): n is a, c, g, or t
  misc_feature (925)..(928): n is a, c, g, or t
  misc_feature (930)..(932): n is a, c, g, or t
  misc_feature (950)..(950): n is a, c, g, or t
  misc_feature (957)..(957): n is a, c, g, or t
  misc_feature (959)..(959): n is a, c, g, or t
  misc_feature (965)..(965): n is a, c, g, or t
  misc_feature (1003)..(1003): n is a, c, g, or t
  misc_feature (1011)..(1011): n is a, c, g, or t
  misc_feature (1014)..(1014): n is a, c, g, or t
  misc_feature (1016)..(1016): n is a, c, g, or t
  misc_feature (1019)..(1019): n is a, c, g, or t
  misc_feature (1024)..(1025): n is a, c, g, or t
  misc_feature (1046)..(1047): n is a, c, g, or t
  misc_feature (1061)..(1061): n is a, c, g, or t
  misc_feature (1070)..(1070): n is a, c, g, or t
  misc_feature (1076)..(1076): n is a, c, g, or t
  misc_feature (1082)..(1082): n is a, c, g, or t
  misc_feature (1084)..(1084): n is a, c, g, or t
  misc_feature (1086)..(1086): n is a, c, g, or t
  misc_feature (1091)..(1091): n is a, c, g, or t
  misc_feature (1097)..(1097): n is a, c, g, or t
  misc_feature (1109)..(1109): n is a, c, g, or t
  misc_feature (1111)..(1111): n is a, c, g, or t
  misc_feature (1120)..(1120): n is a, c, g, or t
  misc_feature (1137)..(1137): n is a, c, g, or t
  misc_feature (1154)..(1154): n is a, c, g, or t
  misc_feature (1159)..(1160): n is a, c, g, or t
  misc_feature (1166)..(1166): n is a, c, g, or t
  misc_feature (1175)..(1175): n is a, c, g, or t
  misc_feature (1200)..(1200): n is a, c, g, or t
cnatagagnaattactatgagaggatcgcatcaccatcaccatcacggatcctatttaggtgacactatagaatcgtcgacccacgcgttccgctcagaatttaatcaaacaaaattgtgagctttttgagcagcttggagagtacaaattccagaatgcgctattagttcgttacaccaagaaagtaccccaagtgtcaactccaactcttgtagaggtctcaagaaacctaggaaaagtgggcagcaaatgttgtaaacatcctgaagcaaaaagaatgccctgtgcagaagactatctatccgtggtcctgaaccagttatgtgtgttgcatgagaaaacgccagtaagtgacagagtcaccaaatgctgcacagaatccttggtgaacaggcgaccatgcttttcagctctggaagtcgatgaaacatacgttcccaaagagtttaatgctgaaacattcaccttccatgcagatatatgcacactttctgagaaggagagacaaatcaagaaacaaactgcacttgttgagcttgtgaaacacaagcccaaggcaacaaaagagcaactgaaagctgttatggatgatttcgcagcttttgtagagaagtgctgcaaggctgacgataaggagacctgctttgccgaggagggtaaaaaacttgttgctgcaagtcaagctgccttaggcttataacatcacatttaaaagcatctcagcctaccatgagaataagagaaagaaaatgaagatcaaaagcttattcatctgtttttctttttcgttggtgtaaagccaacaccctgtctaaaaaaacataaatttctttaatcattttgcctcttttctctgtgcttcnaattaataaaaaatggaaagaatctnnnanaaaaannanaannnnnnannnnnnnnanaannnnannnggggcggcccccccccanagggagncnattaancttatttaactgaaccttggaccccgtggaaaaatccngtaatganccncnaanccccnnctggatttttttcaaaacccnncggttgcccccggnggttttttntggggnaaaccnancnacctngggganatttccggggcntngggaagctnaaaaggggaaaaaaaancccgggaataccccccnttaannttcccnaggcccccnaaaaaaaatttggggtttccccccn

SEQ ID NO: 236 - DNA, 256 bp, Homo Sapiens
gcgaggaggcagccccagccgacaagggtcgcaaacatgagtgcagcaaggaggctccggcagagcccggcggggaggcccaggagcactgggtgcatgaggcctgtgccgtgtggaccggcggcgtctacctggtggccgggaagctctttgggctgcaggaggccatgaaggtggccgtggacatgatgtgttccagctgccaagaagccggggccaccatcgggtgctgccacaaaggatgcctccacaccta

SEQ ID NO: 237 - DNA, 1292 bp, Homo Sapiens
  misc_feature (939)..(939): n is a, c, g, or t
  misc_feature (941)..(941): n is a, c, g, or t
  misc_feature (977)..(977): n is a, c, g, or t
  misc_feature (983)..(983): n is a, c, g, or t
  misc_feature (990)..(990): n is a, c, g, or t
  misc_feature (992)..(992): n is a, c, g, or t
  misc_feature (995)..(995): n is a, c, g, or t
  misc_feature (999)..(999): n is a, c, g, or t
  misc_feature (1010)..(1010): n is a, c, g, or t
  misc_feature (1018)..(1018): n is a, c, g, or t
  misc_feature (1026)..(1026): n is a, c, g, or t
  misc_feature (1028)..(1028): n is a, c, g, or t
  misc_feature (1035)..(1035): n is a, c, g, or t
  misc_feature (1037)..(1037): n is a, c, g, or t
  misc_feature (1050)..(1050): n is a, c, g, or t
  misc_feature (1052)..(1052): n is a, c, g, or t
  misc_feature (1076)..(1076): n is a, c, g, or t
  misc_feature (1079)..(1079): n is a, c, g, or t
  misc_feature (1082)..(1082): n is a, c, g, or t
  misc_feature (1090)..(1090): n is a, c, g, or t
  misc_feature (1096)..(1096): n is a, c, g, or t
  misc_feature (1110)..(1110): n is a, c, g, or t
  misc_feature (1116)..(1116): n is a, c, g, or t
  misc_feature (1121)..(1121): n is a, c, g, or t
  misc_feature (1126)..(1126): n is a, c, g, or t
  misc_feature (1141)..(1141): n is a, c, g, or t
  misc_feature (1149)..(1150): n is a, c, g, or t
  misc_feature (1155)..(1155): n is a, c, g, or t
  misc_feature (1160)..(1160): n is a, c, g, or t
  misc_feature (1162)..(1162): n is a, c, g, or t
  misc_feature (1166)..(1166): n is a, c, g, or t
  misc_feature (1169)..(1169): n is a, c, g, or t
  misc_feature (1177)..(1177): n is a, c, g, or t
  misc_feature (1179)..(1179): n is a, c, g, or t
  misc_feature (1181)..(1182): n is a, c, g, or t
  misc_feature (1185)..(1185): n is a, c, g, or t
  misc_feature (1188)..(1188): n is a, c, g, or t
  misc_feature (1191)..(1191): n is a, c, g, or t
  misc_feature (1195)..(1195): n is a, c, g, or t
  misc_feature (1197)..(1198): n is a, c, g, or t
  misc_feature (1202)..(1202): n is a, c, g, or t
  misc_feature (1226)..(1226): n is a, c, g, or t
  misc_feature (1228)..(1228): n is a, c, g, or t
  misc_feature (1240)..(1240): n is a, c, g, or t
  misc_feature (1262)..(1262): n is a, c, g, or t
  misc_feature (1267)..(1267): n is a, c, g, or t
  misc_feature (1292)..(1292): n is a, c, g, or t
tagagaaattactatgagaggatcgcatcaccatcaccatcacggatcctatttaggtgacactatagaatcgtcgacccacgcgtccggaggtgcaccatccatcacatctgtcacaccaagaggactgtgcagagatgaggaagacacctcttttgaatcactttctaaattcaatgtcaagtttccacctatggacaatgactcaactttcttacatagcactccagagagacccggcatccttagtcctgccacgtctgaggcagtgtgccaagagaaatttaatatggagttcagagacaacccagggaactttgttaaaacagaagaaactttatttgaaattcagggaattgaccccatagcttcagctatacaaaaccttaaaacaactgacaaaacaaagccctcaaatctcgtaaacacttgtatcaggacaactctggatagagctgcgtgtttgccacctggagaccataatgcattatatgtaaatagcttcccacttctggacccatctgatgcaccttttccctcactcgattccccgggaaaagcaatccgaggaccacagcagcccatttggaagccctttcctaatcaagacagtgactcggtggtactaagtggcacagactcagaactgcatatacctcgagtatgtgaattctgtcaagcagttttcccaccatccattacatccaggggggatttccttcggcatcttaattcacacttcaatggagagacttaagacacatttgaaaacagacatatcaagttctatgtgatgattttgggtttttaatactataaatacttgattgtaaactaaattcaagatcatttataggaaaatctagtttcacagctatttgaatttttttctggatttactatataactcttattttttaaaagatcattctgttcttncnaggagaataagcctaaaagaagaaaacaaaaaaatnctgtanaaactgnanccntggnatcaggttacngggctatnactaaatncnaattagnangggactaagtaananccaattttgttattcaaaatcaanttntgntggattcnagggancggtgaatgggggncaagtncaggnttttnttttttttgaaattntttttggnnagggnattcntngaanccnaaaaaaancnannaanccntgnaaanannaaantttgcgggaaacggggaattaacntnatttaaaaaggntttttgggggccgggaaaaatnggggnaaaaaaaaaaaaaaaaaaaaaggcn

SEQ ID NO: 238 - DNA, 1395 bp, Homo Sapiens
  misc_feature (936)..(936): n is a, c, g, or t
  misc_feature (965)..(965): n is a, c, g, or t
  misc_feature (967)..(968): n is a, c, g, or t
  misc_feature (991)..(991): n is a, c, g, or t
  misc_feature (1029)..(1029): n is a, c, g, or t
  misc_feature (1031)..(1031): n is a, c, g, or t
  misc_feature (1034)..(1034): n is a, c, g, or t
  misc_feature (1045)..(1045): n is a, c, g, or t
  misc_feature (1047)..(1047): n is a, c, g, or t
  misc_feature (1049)..(1049): n is a, c, g, or t
  misc_feature (1053)..(1053): n is a, c, g, or t
  misc_feature (1118)..(1118): n is a, c, g, or t
  misc_feature (1120)..(1120): n is a, c, g, or t
  misc_feature (1123)..(1124): n is a, c, g, or t
  misc_feature (1132)..(1132): n is a, c, g, or t
  misc_feature (1134)..(1134): n is a, c, g, or t
  misc_feature (1140)..(1140): n is a, c, g, or t
  misc_feature (1142)..(1142): n is a, c, g, or t
  misc_feature (1149)..(1149): n is a, c, g, or t
  misc_feature (1174)..(1174): n is a, c, g, or t
  misc_feature (1177)..(1178): n is a, c, g, or t
  misc_feature (1181)..(1181): n is a, c, g, or t
  misc_feature (1185)..(1185): n is a, c, g, or t
  misc_feature (1187)..(1187): n is a, c, g, or t
  misc_feature (1190)..(1191): n is a, c, g, or t
  misc_feature (1195)..(1195): n is a, c, g, or t
  misc_feature (1197)..(1197): n is a, c, g, or t
  misc_feature (1199)..(1199): n is a, c, g, or t
  misc_feature (1229)..(1229): n is a, c, g, or t
  misc_feature (1248)..(1248): n is a, c, g, or t
  misc_feature (1251)..(1251): n is a, c, g, or t
  misc_feature (1256)..(1257): n is a, c, g, or t
  misc_feature (1260)..(1260): n is a, c, g, or t
  misc_feature (1263)..(1265): n is a, c, g, or t
  misc_feature (1273)..(1273): n is a, c, g, or t
  misc_feature (1277)..(1277): n is a, c, g, or t
  misc_feature (1279)..(1279): n is a, c, g, or t
  misc_feature (1282)..(1282): n is a, c, g, or t
  misc_feature (1296)..(1296): n is a, c, g, or t
  misc_feature (1300)..(1300): n is a, c, g, or t
  misc_feature (1302)..(1302): n is a, c, g, or t
  misc_feature (1310)..(1310): n is a, c, g, or t
  misc_feature (1328)..(1328): n is a, c, g, or t
  misc_feature (1332)..(1332): n is a, c, g, or t
  misc_feature (1334)..(1334): n is a, c, g, or t
  misc_feature (1336)..(1337): n is a, c, g, or t
  misc_feature (1341)..(1341): n is a, c, g, or t
  misc_feature (1347)..(1348): n is a, c, g, or t
  misc_feature (1351)..(1352): n is a, c, g, or t
  misc_feature (1354)..(1354): n is a, c, g, or t
  misc_feature (1357)..(1361): n is a, c, g, or t
  misc_feature (1367)..(1367): n is a, c, g, or t
  misc_feature (1369)..(1369): n is a, c, g, or t
  misc_feature (1371)..(1371): n is a, c, g, or t
  misc_feature (1379)..(1380): n is a, c, g, or t
  misc_feature (1395)..(1395): n is a, c, g, or t
atagagagattactatgagaggatcgcatcaccatcaccatcacggatcctatttaggtgacactatagaatcgtcgacccacgcgtccgagcgggggaagatggcggcggccgttccacagcgggcgtggaccgtggagcagctgcgcagtgagcagctgcccaagaaggacattatcaagtttctgcaggaacacggttcagattcgtttcttgcagaacataaattattaggaaacattaaaaatgtggccaagacagctaacaaggaccacttggttacagcctataaccatctttttgaaactaagcgttttaagggtactgaaagtataagtaaagtgtctgagcaagtaaaaaatgtgaagcttaatgaagataaacccaaagaaaccaagtctgaagagaccctggatgagggtccaccaaaatatactaaatctgttctgaaaaagggagataaaaccaactttcccaaaaagggagatgttgttcactgctggtatacaggaacactacaagatgggactgtttttgatactaatattcaaacaagtgcaaagaagaagaaaaatgccaagcctttaagttttaaggtcggagtaggcaaagttatcagaggatgggatgaagctctcttgactatgagtaaaggagaaaaggctcgactggagattgaaccagaatgggcttacggaaagaaaggacagcctgatgccaaaattccaccaaatgcaaaactcacttttgaagtggaattagtggatattgattgaaaatagcagtgcttcagctctaaggatattagcaacaatgataaaacttggccttgaagaatttacacaactagttagaacttgttactattgtaagggaagagtcaactggaaaattcaaggagttaataaaatttgtttacttggtccccaccttttngagaaaaaaatcccttatgaatccccggncnnaaatacttttcctacagctgtgntaaatactggtccaggaaaaactttttcccttttaccncntgntggaaaacttnangnggcnccaataaaaattgatccccctgtcttgaaaaaaaaaaaaaaaaaaaaaaaaaaaaaggggggccncnccnnaagggggncnaataancnttaattnacctgacctggaccccggtgaaaanccnnaangccncnaanncccncngnatttttcaaaccccccggttgcccccgggnttttttttggggaaacccnccncttgnnaanttnnnggcctagnaccnanggnaaaaacccgggaancccntnaaatcccnggcccaaaaaatttgggntttncntnnccgnccaaannccnncnggnnnnncctttnancnaaaaaacnnttttccctttttctn

SEQ ID NO: 239 - DNA, 1214 bp, Homo Sapiens
  misc_feature (1)..(1): n is a, c, g, or t
  misc_feature (4)..(4): n is a, c, g, or t
  misc_feature (903)..(903): n is a, c, g, or t
  misc_feature (920)..(920): n is a, c, g, or t
  misc_feature (923)..(923): n is a, c, g, or t
  misc_feature (925)..(925): n is a, c, g, or t
  misc_feature (958)..(958): n is a, c, g, or t
  misc_feature (960)..(960): n is a, c, g, or t
  misc_feature (982)..(982): n is a, c, g, or t
  misc_feature (999)..(999): n is a, c, g, or t
  misc_feature (1017)..(1017): n is a, c, g, or t
  misc_feature (1019)..(1019): n is a, c, g, or t
  misc_feature (1022)..(1022): n is a, c, g, or t
  misc_feature (1025)..(1025): n is a, c, g, or t
  misc_feature (1036)..(1036): n is a, c, g, or t
  misc_feature (1060)..(1060): n is a, c, g, or t
  misc_feature (1084)..(1084): n is a, c, g, or t
  misc_feature (1091)..(1091): n is a, c, g, or t
  misc_feature (1113)..(1113): n is a, c, g, or t
  misc_feature (1125)..(1125): n is a, c, g, or t
  misc_feature (1134)..(1134): n is a, c, g, or t
  misc_feature (1136)..(1136): n is a, c, g, or t
  misc_feature (1142)..(1142): n is a, c, g, or t
  misc_feature (1145)..(1145): n is a, c, g, or t
  misc_feature (1148)..(1148): n is a, c, g, or t
  misc_feature (1157)..(1157): n is a, c, g, or t
  misc_feature (1164)..(1164): n is a, c, g, or t
  misc_feature (1175)..(1176): n is a, c, g, or t
  misc_feature (1178)..(1178): n is a, c, g, or t
  misc_feature (1186)..(1186): n is a, c, g, or t
  misc_feature (1190)..(1190): n is a, c, g, or t
  misc_feature (1192)..(1193): n is a, c, g, or t
  misc_feature (1205)..(1205): n is a, c, g, or t
  misc_feature (1212)..(1213): n is a, c, g, or t
naantagagaaaattaactatgagaggatcgcatcaccatcaccatcacggatcctatttaggtgacactatagaatcgtcgacccacgcgtccgcccacgcgtccggtcgacttctcctcggaggtgactgctgccctccgagtcaccgatggcgcattggtggtggtggactgcgtgtcaggcgtgtgcgtgcagacggagacagtgctgcggcaggccattgccgagcgcatcaagcctgtgctgatgatgaacaagatggaccgcgccctgctggagctgcagctggagcccgaggagctctaccagactttccagcgcatcgtggagaacgtgaacgtcatcatctccacctacggcgagggcgagagcggccccatgggcaacatcatgatcgatcctgtcctcggtaccgtgggctttgggtctggcctccacgggtgggccttcaccctgaagcagtttgccgagatgtatgtggccaagttcgccgccaagggggagggccagttggggcctgccgagcgggccaagaaagtagaggacatgatgaagaagctgtggggtgacaggtactttgacccagccaacggcaagttcagcaagtcagccaccagccccgaagggaagaagctgccacgcaccttctgccagctgatcctggaccccatcttcaaggtgtttgatgcgatcatgaatttcaagaaagaggagacagcaaaactgatagagaaactggacatcaaactggacagcgaggacaaggacaaagaaggcaaacccctgctgaaggctgtgatgcgccgctggctgcctgccggagacgccttgttgcagatgatcaccatccacctgccctcccctgtgacggcccaaaagtaccgctgcgagctcctgtacnaagggccccccggaacnacnangctgccatgggcattaaaagctgtgaccccaangnccctcttatgatgtatatttcnaaatggtgccaacctcnaaaaaggtcggttctacncnttnganaaatcttcccngggctggtctccctggcctgaagntcaggatcatggggcccaactaanccctggnaaaaagagaacctctactgaanccatccaaaaanaattttganangggccnctnctngaaccatcnaggaatngcttggggaanntntgggcctngggngnngaacattctggnaaaaggnnc

SEQ ID NO: 240 - DNA, 1330 bp, Homo Sapiens
  misc_feature (703)..(703): n is a, c, g, or t
  misc_feature (771)..(771): n is a, c, g, or t
  misc_feature (847)..(847): n is a, c, g, or t
  misc_feature (868)..(868): n is a, c, g, or t
  misc_feature (886)..(886): n is a, c, g, or t
  misc_feature (892)..(892): n is a, c, g, or t
  misc_feature (921)..(921): n is a, c, g, or t
  misc_feature (929)..(929): n is a, c, g, or t
  misc_feature (935)..(935): n is a, c, g, or t
  misc_feature (963)..(963): n is a, c, g, or t
  misc_feature (984)..(984): n is a, c, g, or t
  misc_feature (997)..(997): n is a, c, g, or t
  misc_feature (1006)..(1006): n is a, c, g, or t
  misc_feature (1012)..(1012): n is a, c, g, or t
  misc_feature (1022)..(1022): n is a, c, g, or t
  misc_feature (1027)..(1027): n is a, c, g, or t
  misc_feature (1029)..(1029): n is a, c, g, or t
  misc_feature (1032)..(1032): n is a, c, g, or t
  misc_feature (1048)..(1048): n is a, c, g, or t
  misc_feature (1065)..(1065): n is a, c, g, or t
  misc_feature (1082)..(1082): n is a, c, g, or t
  misc_feature (1092)..(1092): n is a, c, g, or t
  misc_feature (1098)..(1098): n is a, c, g, or t
  misc_feature (1115)..(1115): n is a, c, g, or t
  misc_feature (1123)..(1123): n is a, c, g, or t
  misc_feature (1125)..(1125): n is a, c, g, or t
  misc_feature (1137)..(1137): n is a, c, g, or t
  misc_feature (1141)..(1141): n is a, c, g, or t
  misc_feature (1145)..(1145): n is a, c, g, or t
  misc_feature (1150)..(1150): n is a, c, g, or t
  misc_feature (1160)..(1163): n is a, c, g, or t
  misc_feature (1166)..(1166): n is a, c, g, or t
  misc_feature (1173)..(1173): n is a, c, g, or t
  misc_feature (1175)..(1175): n is a, c, g, or t
  misc_feature (1190)..(1190): n is a, c, g, or t
  misc_feature (1195)..(1195): n is a, c, g, or t
  misc_feature (1198)..(1198): n is a, c, g, or t
  misc_feature (1206)..(1206): n is a, c, g, or t
  misc_feature (1213)..(1214): n is a, c, g, or t
  misc_feature (1223)..(1223): n is a, c, g, or t
  misc_feature (1240)..(1241): n is a, c, g, or t
  misc_feature (1248)..(1248): n is a, c, g, or t
  misc_feature (1250)..(1251): n is a, c, g, or t
  misc_feature (1254)..(1258): n is a, c, g, or t
  misc_feature (1262)..(1263): n is a, c, g, or t
  misc_feature (1265)..(1265): n is a, c, g, or t
  misc_feature (1267)..(1271): n is a, c, g, or t
  misc_feature (1273)..(1273): n is a, c, g, or t
  misc_feature (1277)..(1277): n is a, c, g, or t
  misc_feature (1280)..(1282): n is a, c, g, or t
  misc_feature (1286)..(1288): n is a, c, g, or t
  misc_feature (1292)..(1292): n is a, c, g, or t
  misc_feature (1295)..(1295): n is a, c, g, or t
  misc_feature (1297)..(1297): n is a, c, g, or t
  misc_feature (1300)..(1303): n is a, c, g, or t
  misc_feature (1314)..(1317): n is a, c, g, or t
  misc_feature (1322)..(1322): n is a, c, g, or t
  misc_feature (1329)..(1329): n is a, c, g, or t
tagagaaattactatgagaggatcgcatcaccatcaccatcacggatcctatttaggtgacactatagaatcgtcgacccacgcgtccgcggacgcgtggggcggcgggtgtgggaggtggcgacggccggggccggggtcctgcccggctgcggaggcgggcgcgacgggcgcgggggtcgctgctcctgaggcgatgatgggcaaggaagaggagattgcgcggatcgcccggaggctggacaagatggtgaccaagaagagcgcggagggagccatggatttgctgcgggagctgaaggccatgcctatcacgctgcacctgctccagtccacccgagtcgggatgtctgtcaacgcccttcggaagcagagctcggatgaggaggtcattgcactggccaagtctctcatcaagtcctggaagaagctcctggatgcttccgatgccaaagccagggagcgggggaggggcatgcctctgcccacgtcctcgagggatgcctcagaggccccggatcccagccgcaagaggccggagctgcccagggcaccgtcgactccgaggatcaccacatttcctccggtgcctgtcacctgtgatgccgtgcgcaacaagtgccgcgagatgctgaccgctgccctgcagacggaccatgaccacgtggccatcggtgcggactgcgagcgcctgtcggctcanatcgaggaatgcatcttccgggacgttggaaacacagacatgaagtataagaaccgtgtacggagtcntatctccaacctgaaggatgccaagaaccctgacctgcggcggaatgtgctgtgtggggccataacaccccagcanatcgctgtgatgacctcaaangaaatggccagtgatganctgaangaaatccgtaaggccatgaccaagaaggncatccganagcacnaaatggcccgcactggcggcacgcaaanaacctgttcacttgcggcaantgcagaaaaaaantgcacctancacagntgcaaacccncactntnaanacccatgacccctttnttgtcgcaacaatttgnaacccctgaaatttgcngaccctcggnaaattnctgcaccttgggccttnccggccantnttcgttaaaaantttnttgnaaacntaaaaggggnnnnccngccccancngccgccggaatgacnttttnccnttcccccntaaaaanntttttttcnaaaaaaaaaaaaaaggnnccccccntnnggnnnnnttanntntnnnnnanttgnccnnnaaannnaaanccnanccnnnngtttttaaccnnnnccccnttttttna

SEQ ID NO: 241 - DNA, 256 bp, Homo Sapiens
  misc_feature (91)..(91): n is a, c, g, or t
  misc_feature (99)..(101): n is a, c, g, or t
  misc_feature (109)..(109): n is a, c, g, or t
  misc_feature (117)..(117): n is a, c, g, or t
  misc_feature (123)..(123): n is a, c, g, or t
  misc_feature (194)..(194): n is a, c, g, or t
  misc_feature (196)..(198): n is a, c, g, or t
  misc_feature (200)..(200): n is a, c, g, or t
  misc_feature (203)..(204): n is a, c, g, or t
  misc_feature (206)..(206): n is a, c, g, or t
  misc_feature (211)..(211): n is a, c, g, or t
  misc_feature (218)..(218): n is a, c, g, or t
  misc_feature (223)..(223): n is a, c, g, or t
  misc_feature (229)..(229): n is a, c, g, or t
  misc_feature (231)..(231): n is a, c, g, or t
  misc_feature (234)..(236): n is a, c, g, or t
  misc_feature (239)..(239): n is a, c, g, or t
  misc_feature (241)..(241): n is a, c, g, or t
  misc_feature (244)..(244): n is a, c, g, or t
  misc_feature (246)..(246): n is a, c, g, or t
  misc_feature (248)..(248): n is a, c, g, or t
  misc_feature (252)..(252): n is a, c, g, or t
tagagaaattactatgagaggatcgcatcaccatcaccatcacggatcctatttaggtgacactatagaatcgtcgacccacgcgtccganaacattgnnnatgccaanaaagatgntgtgtnacactaagcatgtttgaggagctcaagagccgtctggacaccctgatcccagagaggtggccctgaatgantnnntnacnngncctgnttacgtnctgcntgaagntnacnnnggngnacntnanatgntttc

SEQ ID NO: 242 - DNA, 1366 bp, Homo Sapiens
  misc_feature (1)..(1): n is a, c, g, or t
  misc_feature (17)..(17): n is a, c, g, or t
  misc_feature (859)..(893): n is a, c, g, or t
  misc_feature (933)..(933): n is a, c, g, or t
  misc_feature (947)..(947): n is a, c, g, or t
  misc_feature (953)..(953): n is a, c, g, or t
  misc_feature (965)..(965): n is a, c, g, or t
  misc_feature (984)..(984): n is a, c, g, or t
  misc_feature (999)..(999): n is a, c, g, or t
  misc_feature (1003)..(1003): n is a, c, g, or t
  misc_feature (1006)..(1006): n is a, c, g, or t
  misc_feature (1015)..(1015): n is a, c, g, or t
  misc_feature (1017)..(1017): n is a, c, g, or t
  misc_feature (1023)..(1023): n is a, c, g, or t
  misc_feature (1025)..(1025): n is a, c, g, or t
  misc_feature (1057)..(1057): n is a, c, g, or t
  misc_feature (1063)..(1064): n is a, c, g, or t
  misc_feature (1066)..(1066): n is a, c, g, or t
  misc_feature (1071)..(1072): n is a, c, g, or t
  misc_feature (1088)..(1088): n is a, c, g, or t
  misc_feature (1104)..(1104): n is a, c, g, or t
  misc_feature (1113)..(1113): n is a, c, g, or t
  misc_feature (1115)..(1115): n is a, c, g, or t
  misc_feature (1123)..(1123): n is a, c, g, or t
  misc_feature (1128)..(1128): n is a, c, g, or t
  misc_feature (1137)..(1138): n is a, c, g, or t
  misc_feature (1141)..(1142): n is a, c, g, or t
  misc_feature (1158)..(1159): n is a, c, g, or t
  misc_feature (1162)..(1164): n is a, c, g, or t
  misc_feature (1167)..(1167): n is a, c, g, or t
  misc_feature (1170)..(1172): n is a, c, g, or t
  misc_feature (1176)..(1178): n is a, c, g, or t
  misc_feature (1192)..(1193): n is a, c, g, or t
  misc_feature (1197)..(1197): n is a, c, g, or t
  misc_feature (1207)..(1208): n is a, c, g, or t
  misc_feature (1211)..(1211): n is a, c, g, or t
  misc_feature (1222)..(1222): n is a, c, g, or t
  misc_feature (1246)..(1248): n is a, c, g, or t
  misc_feature (1252)..(1253): n is a, c, g, or t
  misc_feature (1255)..(1255): n is a, c, g, or t
  misc_feature (1257)..(1257): n is a, c, g, or t
  misc_feature (1275)..(1275): n is a, c, g, or t
  misc_feature (1279)..(1280): n is a, c, g, or t
  misc_feature (1282)..(1283): n is a, c, g, or t
  misc_feature (1285)..(1285): n is a, c, g, or t
  misc_feature (1293)..(1293): n is a, c, g, or t
  misc_feature (1302)..(1302): n is a, c, g, or t
  misc_feature (1307)..(1308): n is a, c, g, or t
  misc_feature (1314)..(1314): n is a, c, g, or t
  misc_feature (1317)..(1317): n is a, c, g, or t
  misc_feature (1321)..(1322): n is a, c, g, or t
  misc_feature (1324)..(1324): n is a, c, g, or t
  misc_feature (1327)..(1327): n is a, c, g, or t
  misc_feature (1332)..(1332): n is a, c, g, or t
  misc_feature (1335)..(1335): n is a, c, g, or t
  misc_feature (1340)..(1341): n is a, c, g, or t
  misc_feature (1361)..(1361): n is a, c, g, or t
naatagagaaaattacnatgaagaggatcgcatcaccatcaccatcacggatcctatttaggtgacactatagaatcgtcgacccacgcgtccgggcctagccgtcgcttacctaggatgccgcgtggaagccgaagccgcacctcccgcatggcccctccggccagccgggcccctcagatgagagctgcacccaggccagcaccagtcgctcagccaccagcagcggcacccccatctgcagttggctcttctgctgctgcgccccggcagccaggtctgatggcccagatggcaaccactgcagctggcgtggctgtgggctctgctgtggggcacacattgggtcacgccattactgggggcttcagtggaggaagtaatgctgagcctgcgaggcctgacatcacttaccaggagcctcagggaacccagccagcacagcagcagcagccttgcctctatgagatcaaacagtttctggagtgtgcccagaaccagggtgacatcaagctctgtgagggtttcaatgaggtgctgaaacagtgccgacttgcaaacggattggcctaatgaagaagttcaacctggagagatggaaaatcagctctcataactaagttaatttagtataaaaatagaattgatagtgagggtataaagtgtaaccatcagttaaacctctcctgtcattcctggcttccttgcttcagaattgaaatggaagtgggggtgtccctactctgtagaatctgggactgggcaaatgtttgtgtggcctccttaaactagctgttatgttatgattttattctttgtgagttaattagaataaagtcattttcttccaaaaaaaaannnnnnnnnnnnnnnnnnnnnnnnnnnnnnnnnnnaaaaaaagggcggccgctccctatagtgagtcgtattaancttaattaactgancttggnactcctgttganaaatccagtaatgacctcnaaactccatctggantttnttnaaaaagctngnttgccncnggggtttttttttttggtgaaaatccaactancttggnnanatttnnggacctaaggaacctnaaatggaaaaaaaaantcctggaanancccccgtnaaaantcccatggnntcnnaaaaaaattttgaggnnttnnntcngtnnncaannnactaaaacaaaacnnttanctggaaatanngcnttttaaaaccnaaaaaaaaaaaccaaattttttcnnncttnntnanttttgcccccgaaaaagncccnncnnantttttagnaaaaaaaanggaanngggaanggnaaanntnccnttttnccnttttnnaaaaaaaaaattttttcttnggaaa

SEQ ID NO: 243 - DNA, 256 bp, Homo Sapiens
ttaactatgagaggatcgcatcaccatcaccatcacggatcctatttaggtgacactatagaatcgtcgacccacgcgtccggtgccgccaagggtgtggccgcctacatgaagtcggaggacccgctgttcgtgctggagcacagcctgcccattgacacgcagtactacctggagcagcagctggccaagcccctcctgcgcatcttcgagcccatcctgggcgagggccgtgccgaggctgtgctactgcggg

SEQ ID NO: 244 - DNA, 256 bp, Homo Sapiens
  misc_feature (4)..(4): n is a, c, g, or t
taangaggagaattaactatgagaggatcgcatcaccatcaccatcacggatcctatttaggtgacactatagaatcgtcgacccacgcgtccgccgcttcttctacaagtatggagaaggcaaaaggcaaggagtggacctccacagagaagtcgagggaagaggatcagcaggcttctaatcaaccaaattcaattgctttgccaggaacatcagcaaagagaaccaaagaaaaaatgtctatcaaaggcagta

SEQ ID NO: 245 - DNA, 1200 bp, Homo Sapiens
  misc_feature (890)..(890): n is a, c, g, or t
  misc_feature (916)..(916): n is a, c, g, or t
  misc_feature (918)..(918): n is a, c, g, or t
  misc_feature (934)..(934): n is a, c, g, or t
  misc_feature (936)..(936): n is a, c, g, or t
  misc_feature (955)..(955): n is a, c, g, or t
  misc_feature (965)..(965): n is a, c, g, or t
  misc_feature (976)..(976): n is a, c, g, or t
  misc_feature (1001)..(1001): n is a, c, g, or t
  misc_feature (1025)..(1025): n is a, c, g, or t
  misc_feature (1040)..(1040): n is a, c, g, or t
  misc_feature (1043)..(1043): n is a, c, g, or t
  misc_feature (1057)..(1057): n is a, c, g, or t
  misc_feature (1062)..(1063): n is a, c, g, or t
  misc_feature (1067)..(1067): n is a, c, g, or t
  misc_feature (1071)..(1071): n is a, c, g, or t
  misc_feature (1074)..(1074): n is a, c, g, or t
  misc_feature (1108)..(1108): n is a, c, g, or t
  misc_feature (1122)..(1122): n is a, c, g, or t
  misc_feature (1129)..(1129): n is a, c, g, or t
  misc_feature (1132)..(1132): n is a, c, g, or t
  misc_feature (1144)..(1145): n is a, c, g, or t
  misc_feature (1155)..(1155): n is a, c, g, or t
  misc_feature (1175)..(1175): n is a, c, g, or t
  misc_feature (1191)..(1200): n is a, c, g, or t
tagagaaattactatgagaggatcgcatcaccatcaccatcacggatcctatttaggtgacactatagaatcgtcgacccacgcgtccgatcatccacgtgcagacgctgacccaggagaacgtcagctgcctcaacaccagcctggtgatcctgatgctggcccgacggaaagagcggctgcccctgtacctgcggctgctgcagcggatggagcacagcaagaagtaccccggcttcctgctcaacaacttccacaacctgctgcgcttctggcagcagcactacctgcacaaggacaaggacagcacctgcctagagaacagctcctgcatcagcttctcatactggaaggagacagtgtccatcctgttgaacccggaccggcagtcaccctctgctctcgttagctacattgaggagccctacatggacatagacagggacttcactgaggagtgaccttgggccaggcctcgggaggctgctgggccagtgtgggtgagcgtgggtacgatgccacacgccctgccctgttcccgttcctccctgctgctctctgcctgccccaggtctttgggtacaggcttggtgggagggaagtcctagaagcccttggtccccctgggtctgagggccctaggtcatggagagcctcagtccccataatgaggacagggtaccatgcccacctttccttcagaaccctggggcccagggccacccagaggtaagaggacatttagcattagctctgtgtgagctcctgccggtttcttggctgtcagtcagtcccagagtggggaggaagatatgggtgacccccaccccccatctgtgagccaagcctcccttgtccctggcctttggacccaggcaaaggcttctganccctgggcaggggtggtgggtaccananaatgctgccttccccnangcctgcccctctgcctcantttcctgtanctcctctggtnctgtttgctcatgggccgctgtgtncatccaagggggttctcccaaaantgaggggccttttcntcnatcccttggggcanggggnnactntgcntgncctgcctttgcctgaggaaccccttctgcttaanctgaaatggggccnttcttgnttnccatttttaacnncaaaaaaccntttaatggaaacattaaaantttttttaaaaaaaannnnnnnnnn

SEQ ID NO: 246 - DNA, 1278 bp, Homo Sapiens
  misc_feature (17)..(17): n is a, c, g, or t
  misc_feature (689)..(689): n is a, c, g, or t
  misc_feature (697)..(697): n is a, c, g, or t
  misc_feature (699)..(699): n is a, c, g, or t
  misc_feature (704)..(708): n is a, c, g, or t
  misc_feature (711)..(711): n is a, c, g, or t
  misc_feature (716)..(718): n is a, c, g, or t
  misc_feature (720)..(721): n is a, c, g, or t
  misc_feature (723)..(724): n is a, c, g, or t
  misc_feature (726)..(728): n is a, c, g, or t
  misc_feature (736)..(736): n is a, c, g, or t
  misc_feature (739)..(739): n is a, c, g, or t
  misc_feature (746)..(746): n is a, c, g, or t
  misc_feature (754)..(756): n is a, c, g, or t
  misc_feature (758)..(758): n is a, c, g, or t
  misc_feature (760)..(760): n is a, c, g, or t
  misc_feature (764)..(764): n is a, c, g, or t
  misc_feature (770)..(770): n is a, c, g, or t
  misc_feature (773)..(775): n is a, c, g, or t
  misc_feature (777)..(777): n is a, c, g, or t
  misc_feature (783)..(783): n is a, c, g, or t
  misc_feature (791)..(793): n is a, c, g, or t
  misc_feature (795)..(796): n is a, c, g, or t
  misc_feature (802)..(802): n is a, c, g, or t
  misc_feature (815)..(815): n is a, c, g, or t
  misc_feature (821)..(821): n is a, c, g, or t
  misc_feature (831)..(832): n is a, c, g, or t
  misc_feature (834)..(834): n is a, c, g, or t
  misc_feature (837)..(837): n is a, c, g, or t
  misc_feature (846)..(846): n is a, c, g, or t
  misc_feature (852)..(852): n is a, c, g, or t
  misc_feature (855)..(856): n is a, c, g, or t
  misc_feature (859)..(860): n is a, c, g, or t
  misc_feature (868)..(868): n is a, c, g, or t
  misc_feature (873)..(873): n is a, c, g, or t
  misc_feature (884)..(884): n is a, c, g, or t
  misc_feature (888)..(888): n is a, c, g, or t
  misc_feature (894)..(895): n is a, c, g, or t
  misc_feature (898)..(898): n is a, c, g, or t
  misc_feature (900)..(901): n is a, c, g, or t
  misc_feature (909)..(909): n is a, c, g, or t
  misc_feature (920)..(920): n is a, c, g, or t
  misc_feature (925)..(927): n is a, c, g, or t
  misc_feature (930)..(930): n is a, c, g, or t
  misc_feature (933)..(935): n is a, c, g, or t
  misc_feature (947)..(947): n is a, c, g, or t
  misc_feature (961)..(961): n is a, c, g, or t
  misc_feature (965)..(965): n is a, c, g, or t
  misc_feature (967)..(967): n is a, c, g, or t
  misc_feature (969)..(969): n is a, c, g, or t
  misc_feature (999)..(999): n is a, c, g, or t
  misc_feature (1003)..(1003): n is a, c, g, or t
  misc_feature (1013)..(1013): n is a, c, g, or t
  misc_feature (1021)..(1021): n is a, c, g, or t
  misc_feature (1027)..(1027): n is a, c, g, or t
  misc_feature (1029)..(1031): n is a, c, g, or t
  misc_feature (1033)..(1037): n is a, c, g, or t
  misc_feature (1041)..(1041): n is a, c, g, or t
  misc_feature (1047)..(1049): n is a, c, g, or t
  misc_feature (1052)..(1052): n is a, c, g, or t
  misc_feature (1059)..(1060): n is a, c, g, or t
  misc_feature (1066)..(1066): n is a, c, g, or t
  misc_feature (1068)..(1069): n is a, c, g, or t
  misc_feature (1073)..(1073): n is a, c, g, or t
  misc_feature (1075)..(1075): n is a, c, g, or t
  misc_feature (1077)..(1077): n is a, c, g, or t
  misc_feature (1080)..(1080): n is a, c, g, or t
  misc_feature (1082)..(1082): n is a, c, g, or t
  misc_feature (1092)..(1092): n is a, c, g, or t
  misc_feature (1096)..(1096): n is a, c, g, or t
  misc_feature (1098)..(1098): n is a, c, g, or t
  misc_feature (1102)..(1102): n is a, c, g, or t
  misc_feature (1114)..(1114): n is a, c, g, or t
  misc_feature (1119)..(1119): n is a, c, g, or t
  misc_feature (1130)..(1130): n is a, c, g, or t
  misc_feature (1140)..(1140): n is a, c, g, or t
  misc_feature (1142)..(1142): n is a, c, g, or t
  misc_feature (1150)..(1150): n is a, c, g, or t
  misc_feature (1156)..(1156): n is a, c, g, or t
  misc_feature (1159)..(1160): n is a, c, g, or t
  misc_feature (1165)..(1165): n is a, c, g, or t
  misc_feature (1167)..(1167): n is a, c, g, or t
  misc_feature (1172)..(1173): n is a, c, g, or t
  misc_feature (1184)..(1184): n is a, c, g, or t
  misc_feature (1195)..(1195): n is a, c, g, or t
  misc_feature (1199)..(1200): n is a, c, g, or t
  misc_feature (1205)..(1206): n is a, c, g, or t
  misc_feature (1216)..(1216): n is a, c, g, or t
  misc_feature (1241)..(1241): n is a, c, g, or t
  misc_feature (1247)..(1247): n is a, c, g, or t
  misc_feature (1266)..(1266): n is a, c, g, or t
  misc_feature (1268)..(1268): n is a, c, g, or t
  misc_feature (1271)..(1271): n is a, c, g, or t
  misc_feature (1277)..(1277): n is a, c, g, or t
taaatagagaaaattanctatgaagaggatcgcatcaccatcaccatcacggatcctatttaggtgacactatagaatcgtcgacccacgcgtccgccgagctggttggtggcggcggtcgtgcggacgcaaacatgcagatctttgtgaagaccctcactggcaaaaccatcacccttgaggtcgagcccagtgacaccattgagaatgtcaaagccaaaattcaagacaaggagggtatcccacctgaccagcagcgtctgatatttgccggcaaacagctggaggatggccgcactctctcagactacaacatccagaaagagtccaccctgcacctggtgttgcgcctgcgaggtggcattattgagccttctctccgccagcttgcccagaaatacaactgcgacaagatgatctgccgcaagtgctatgctcgccttcaccctcgtgctgtcaactgccgcaagaagaagtgtggtcacaccaacaacctgcgtcccaagaagaaggtcaaataaggtggttctttccttgaagggcagcctcctgcccaggccccgtggccctggagcctcaataaagtgtccctttcattgaaaaaaaaaaaaaaaaaaaaaaaaaaaaaaaaaaaaaaaaaaaaaaaaaaaaaaaaaaaaaaaaaaaaaaaaaaaaaaaaaaaaaaaaanaaaaaaananaaaannnnnaanaaaannnannannannngggggggnccnccccccnaggggggnnnananaaancttttnttnnngnaatttnggcccccnnngnnaaaaanaccccaaaaaggncccccnaaaacccccnntntgnttttttttnaaaaanccnnggnngggccccnggggnttttttttttngggnaaaaanncancnnctttgggngaaattttttnggggnnntanggnnnttttaatggggnaaaaaaaaaacccngggntnantccccccttttaaattttcccccgggggcnccanaaaaaaaaanttttgggngttttnannncnnnnngccnaaggannntanaaaccanncccctncnngggnanantancngccctttttnaaanancggnaaaaaaaaaaanccccnttttttttccngccttttttntncttttttngccccnggnnaaagngnccccnnattttttaggnaaaaaaaaaangggnngtggnnataggaaaantttcccctttttaacccttttttanaaaaanaaaaattttttcccctggnanaanaaccana

SEQ ID NO: 247 - DNA, 256 bp, Homo Sapiens
ccggagccagctctagggcccgtgcaggccacaccatgaacacctccccaggcacggtgggcagtgacccggtcatcctggccactgcaggctacgaccacaccgtgcgcttctggcaggcccacagcggcatctgcacccggacggtgcagcaccaggactcccaggtgaatgccttggaggtcacaccggaccgcagcatgattgctgctgcaggttaccagcacatccgcatgtatgatctcaactccaataa

SEQ ID NO: 248 - DNA, 256 bp, Homo Sapiens
ctgggcgaccggcgcgtcgtgcggggctgcggcggagcctccttaaggaaggtgcaagaggttggcagcttcgattgaagcacatcgaccggcgacagcagccaggagtcatgagcgacagcggcgagcagaactacggcgagcgggaatcccgttctgcttccagaagtggaagtgctcacggatcggggaaatctgcaaggcatacccctgcaaggtctcgctccaaggaagattccaggcgttccagatcaaa

SEQ ID NO: 249 - DNA, 1200 bp, Homo Sapiens
  misc_feature (684)..(684): n is a, c, g, or t
  misc_feature (785)..(785): n is a, c, g, or t
  misc_feature (835)..(835): n is a, c, g, or t
  misc_feature (878)..(878): n is a, c, g, or t
  misc_feature (880)..(880): n is a, c, g, or t
  misc_feature (892)..(892): n is a, c, g, or t
  misc_feature (905)..(906): n is a, c, g, or t
  misc_feature (912)..(912): n is a, c, g, or t
  misc_feature (914)..(914): n is a, c, g, or t
  misc_feature (917)..(917): n is a, c, g, or t
  misc_feature (924)..(924): n is a, c, g, or t
  misc_feature (935)..(935): n is a, c, g, or t
  misc_feature (948)..(948): n is a, c, g, or t
  misc_feature (950)..(950): n is a, c, g, or t
  misc_feature (971)..(971): n is a, c, g, or t
  misc_feature (973)..(973): n is a, c, g, or t
  misc_feature (998)..(998): n is a, c, g, or t
  misc_feature (1004)..(1004): n is a, c, g, or t
  misc_feature (1013)..(1013): n is a, c, g, or t
  misc_feature (1015)..(1015): n is a, c, g, or t
  misc_feature (1020)..(1020): n is a, c, g, or t
  misc_feature (1042)..(1042): n is a, c, g, or t
  misc_feature (1047)..(1047): n is a, c, g, or t
  misc_feature (1056)..(1056): n is a, c, g, or t
  misc_feature (1060)..(1060): n is a, c, g, or t
  misc_feature (1072)..(1072): n is a, c, g, or t
  misc_feature (1096)..(1096): n is a, c, g, or t
  misc_feature (1109)..(1109): n is a, c, g, or t
  misc_feature (1111)..(1111): n is a, c, g, or t
  misc_feature (1120)..(1120): n is a, c, g, or t
  misc_feature (1123)..(1123): n is a, c, g, or t
  misc_feature (1132)..(1132): n is a, c, g, or t
  misc_feature (1137)..(1137): n is a, c, g, or t
  misc_feature (1145)..(1145): n is a, c, g, or t
  misc_feature (1169)..(1169): n is a, c, g, or t
  misc_feature (1171)..(1171): n is a, c, g, or t
  misc_feature (1176)..(1177): n is a, c, g, or t
  misc_feature (1194)..(1194): n is a, c, g, or t
  misc_feature (1196)..(1196): n is a, c, g, or t
  misc_feature (1198)..(1198): n is a, c, g, or t
  misc_feature (1200)..(1200): n is a, c, g, or t
aatagagaaattactatgagaggatcgcatcaccatcaccatcacggatcctatttaggtgacactatagaatcgtcgacccacgcgtccgacaacatcgtcactaaaactgacacaaatccttctgaaagcactcctgtttcctgctatccatgtaaccgagtgaaaactgattctgtggacctgaaatccccgtttggaagtccttctgctgaagctgtgtcctctcggctctcatggcctaaccattattcaggagcatcagaaagccagaccaggagtgacttcctgctggatccaagcaggagttatagttaccctagacaaaagacgccaggcacaccaaagagaaactgcccagcaccttttgattttgatggctgtgagctcctggccagccccactagcccagtcactgcagaattcagtagcagcgtctctggttgtcccaagtcagccagctactctctggagagcacagatgtgaaatctcttgcagctggtgtgacaaagcagagtacgtcatgccctgccttaccccccagggctccaaaactagtggaagagaaggtcgcctccgaaacatctcctttgcctctgaaaattgatggtgctgaggaagaccccaagtctgggtcaccagatctctcggaggaccagtattttgttaaaaagggcatgcangacatcttctctgcctcctaccctttctcatctccgctccatctccagctggcccccagatcctgtggcgacggttccccatggcagccacctgctgaccntatcaggactctctatagaggaagtgtccaagtcactacggttcattggnttgtccgaaagatgtcatatcatttctttgttactgaaaaaantngatggggaaccntgctttgtttcannctaacngnaanaaaatcnttctccaaagnatttcaaattgancnaaattgccagggtgaaaaaananaatggcaaattcattaaatgggctnggaggncccaaaaananaaccnaaataaaccccccgggccagcnttggnaaaaaaacngaantcaatggcgtgntgccaaaaaaggggggggctgggnaaaccaattttcntnttttttccnctnaaaaacttnttctngtaaaaangggaaaaaaaaaactcttaatatncnaaatnntttttttaaaggggaanangntn

SEQ ID NO: 250 - DNA, 256 bp, Homo Sapiens
  misc_feature (5)..(5): n is a, c, g, or t
  misc_feature (43)..(43): n is a, c, g, or t
  misc_feature (53)..(53): n is a, c, g, or t
tcggnaatataaaaaattatttgctttgtgagcggatacaatntaatagattnattgtgagcggataacaatttacacagaattattaaagaggagaaattaactatgagaggatcgcatcaccatcaccatcacggatcctatttaggtgacactatagaatcgtcgacccacgcgtccgcccacgcgtccgaattcgtgatggcgggggctggttccgccgctgtatcgggggcagggaccccggtggcggggc

SEQ ID NO: 251 - DNA, 1229 bp, Homo Sapiens
  misc_feature (861)..(861): n is a, c, g, or t
  misc_feature (912)..(912): n is a, c, g, or t
  misc_feature (918)..(918): n is a, c, g, or t
  misc_feature (943)..(943): n is a, c, g, or t
  misc_feature (956)..(956): n is a, c, g, or t
  misc_feature (967)..(967): n is a, c, g, or t
  misc_feature (988)..(988): n is a, c, g, or t
  misc_feature (994)..(994): n is a, c, g, or t
  misc_feature (1024)..(1024): n is a, c, g, or t
  misc_feature (1048)..(1048): n is a, c, g, or t
  misc_feature (1079)..(1080): n is a, c, g, or t
  misc_feature (1086)..(1086): n is a, c, g, or t
  misc_feature (1092)..(1092): n is a, c, g, or t
  misc_feature (1097)..(1098): n is a, c, g, or t
  misc_feature (1100)..(1100): n is a, c, g, or t
  misc_feature (1111)..(1111): n is a, c, g, or t
  misc_feature (1135)..(1135): n is a, c, g, or t
  misc_feature (1145)..(1145): n is a, c, g, or t
  misc_feature (1148)..(1148): n is a, c, g, or t
  misc_feature (1152)..(1152): n is a, c, g, or t
  misc_feature (1154)..(1154): n is a, c, g, or t
  misc_feature (1156)..(1156): n is a, c, g, or t
  misc_feature (1158)..(1158): n is a, c, g, or t
  misc_feature (1162)..(1162): n is a, c, g, or t
  misc_feature (1165)..(1166): n is a, c, g, or t
  misc_feature (1178)..(1179): n is a, c, g, or t
  misc_feature (1200)..(1200): n is a, c, g, or t
  misc_feature (1213)..(1213): n is a, c, g, or t
  misc_feature (1221)..(1221): n is a, c, g, or t
  misc_feature (1226)..(1226): n is a, c, g, or t
gagaaattactatgagaggatcgcatcaccatcaccatcacggatcctatttaggtgacactatagaatcgtcgacccacgcgtccgcccggatccagggagaactggagaagttaaatcagtccacggatgatatcaacagacgggagactgaacttgaggatgctcgtcagaagttccgctctgttctggttgaagcaacggtgaaactggatgaactggtgaagaaaattggcaaagctgtggaagactccaagccctactgggaggcacggagggtggcgaggcaggctcagctggaagctcagaaagccacgcaggacttccagagggccacagaggtgctccgcgccgccaaggagaccatctccctggccgagcagcggctgctggaggatgacaagcggcagttcgactccgcctggcaggagatgctgaatcacgccactcagagggtcatggaggcggagcagaccaagaccaggagcgagctggtgcataaggagacggcagccaggtacaatgccgccatgggccgcatgcgacagctggagaagaaactcaagagagccatcaacaagtccaagccttattttgaactcaaggcaaagtactatgtgcagctcgagcaactgaaaaagactgtggatgacctgcaggccaaactgaccctggcaaaaggcgagtacaagatggccctgaagaacctggagatgatctcagatgagatccacgagcggcggcgctccagtgccatggggcctcggggatgcggtgttggtgctgagggcagcagcacatctgtggaggatctgccagggagcaaacctgagcctgatgccatttctggagacagggcanaaggggcagagaataaacaagtgacaaagccaacaacaaccggggcctcancagtancagtggcagtggtggcagcagtaanagccaaagcagcncctcccctganggccaggccttggaaaaccgnatgaancactttccctacgtgctcaagggaagaaanggaattattgctgacttaaaatgntgcaaatggctgattctcctgggccctggcnnagtgcntttcanctttnncntggaactgganaacttttgcccatattcttttaantttgccaaanttnaccntntncntaantgnnctatgaatttcnngaccttgaggctaaaattttnttttggtaaaacnttgggtgnttttnaaa

SEQ ID NO: 252 - DNA, 1200 bp, Homo Sapiens
  misc_feature (795)..(795): n is a, c, g, or t
  misc_feature (848)..(848): n is a, c, g, or t
  misc_feature (864)..(864): n is a, c, g, or t
  misc_feature (890)..(890): n is a, c, g, or t
  misc_feature (896)..(896): n is a, c, g, or t
  misc_feature (909)..(909): n is a, c, g, or t
  misc_feature (953)..(953): n is a, c, g, or t
  misc_feature (971)..(971): n is a, c, g, or t
  misc_feature (973)..(973): n is a, c, g, or t
  misc_feature (976)..(976): n is a, c, g, or t
  misc_feature (984)..(984): n is a, c, g, or t
  misc_feature (996)..(996): n is a, c, g, or t
  misc_feature (1003)..(1003): n is a, c, g, or t
  misc_feature (1015)..(1015): n is a, c, g, or t
  misc_feature (1023)..(1023): n is a, c, g, or t
  misc_feature (1025)..(1025): n is a, c, g, or t
  misc_feature (1041)..(1041): n is a, c, g, or t
  misc_feature (1048)..(1048): n is a, c, g, or t
  misc_feature (1053)..(1053): n is a, c, g, or t
  misc_feature (1059)..(1059): n is a, c, g, or t
  misc_feature (1069)..(1070): n is a, c, g, or t
  misc_feature (1079)..(1080): n is a, c, g, or t
  misc_feature (1087)..(1087): n is a, c, g, or t
  misc_feature (1090)..(1090): n is a, c, g, or t
  misc_feature (1093)..(1093): n is a, c, g, or t
  misc_feature (1097)..(1097): n is a, c, g, or t
  misc_feature (1099)..(1099): n is a, c, g, or t
  misc_feature (1102)..(1102): n is a, c, g, or t
  misc_feature (1105)..(1105): n is a, c, g, or t
  misc_feature (1110)..(1110): n is a, c, g, or t
  misc_feature (1112)..(1112): n is a, c, g, or t
  misc_feature (1119)..(1119): n is a, c, g, or t
  misc_feature (1125)..(1125): n is a, c, g, or t
  misc_feature (1135)..(1135): n is a, c, g, or t
  misc_feature (1138)..(1138): n is a, c, g, or t
  misc_feature (1142)..(1143): n is a, c, g, or t
  misc_feature (1149)..(1149): n is a, c, g, or t
  misc_feature (1160)..(1160): n is a, c, g, or t
  misc_feature (1164)..(1166): n is a, c, g, or t
  misc_feature (1170)..(1170): n is a, c, g, or t
  misc_feature (1179)..(1180): n is a, c, g, or t
  misc_feature (1182)..(1182): n is a, c, g, or t
  misc_feature (1186)..(1186): n is a, c, g, or t
  misc_feature (1191)..(1191): n is a, c, g, or t
tagagaaattactatgagaggatcgcatcaccatcaccatcacggatcctatttaggtgacactatagaatcgtcgacccacgcgtccggcggatcagcgtctactacaacgaggcctcttctcacaagtacgtgcctcgagccattctggtggacctggaacccggaaccatggacagtgtccgctcaggggcctttggacatctcttcaggcctgacaatttcatctttggtcagagtggggccggcaacaactgggccaagggtcactacacggagggggcggagctggtggattcggtcctggatgtggtgcggaaggagtgtgaaaactgcgactgcctgcagggcttccagctgacccactcgctggggggcggcacgggctccggcatgggcacgttgctcatcagcaaggtgcgtgaggagtatcccgaccgcatcatgaacaccttcagcgtcgtgccctcacccaaggtgtcagacacggtggtggagccctacaacgccacgctgtccatccaccagctggtggagaacacggatgagacctactgcatcgacaacgaggcgctctacgacatctgcttccgcaccctcaagctggccacgcccacctacggggacctcaaccacctggtatcggccaccatgagcggagtcaccacctccttgcgcttcccgggccagctcaacgctgacctgcgcaagctggccgtcaacatggtgcccttcccgcgcctgcacttcttcatgcccggcttcgcccccctcacagcccggggcagccagcantaccgggccctgaccgtgcccgaactcacccagcaaatgttcgatgccaaaanatgatggccgcctgcnaaccgcgccacgggccgctacctganggtggnccaccgtgttccngggccccatgtccatgaaaggaagtggaaaaaacaaatgctggnccatccaaaacaaaaaanancanctacttcntggaaatggatnccccaanaacgtgaaaggnggccctgngngaaaatcccccccccngggcctnaaaangtcccncccctttatnnggaaaaaanngggccanccnagnaaantnttnaancccantncccaaanaatttnaagggccatnttncggnncaaagncctttcttgcnttgnnnaacnggcaaaggnntngaanaaaantgaaatttc

SEQ ID NO: 253 - DNA, 1417 bp, Homo Sapiens
  misc_feature (958)..(958): n is a, c, g, or t
  misc_feature (966)..(966): n is a, c, g, or t
  misc_feature (999)..(999): n is a, c, g, or t
  misc_feature (1001)..(1001): n is a, c, g, or t
  misc_feature (1007)..(1007): n is a, c, g, or t
  misc_feature (1009)..(1009): n is a, c, g, or t
  misc_feature (1012)..(1012): n is a, c, g, or t
  misc_feature (1016)..(1016): n is a, c, g, or t
  misc_feature (1021)..(1021): n is a, c, g, or t
  misc_feature (1043)..(1043): n is a, c, g, or t
  misc_feature (1068)..(1070): n is a, c, g, or t
  misc_feature (1075)..(1075): n is a, c, g, or t
  misc_feature (1084)..(1084): n is a, c, g, or t
  misc_feature (1091)..(1091): n is a, c, g, or t
  misc_feature (1096)..(1096): n is a, c, g, or t
  misc_feature (1098)..(1098): n is a, c, g, or t
  misc_feature (1111)..(1111): n is a, c, g, or t
  misc_feature (1131)..(1131): n is a, c, g, or t
  misc_feature (1135)..(1135): n is a, c, g, or t
  misc_feature (1137)..(1137): n is a, c, g, or t
  misc_feature (1141)..(1141): n is a, c, g, or t
  misc_feature (1146)..(1147): n is a, c, g, or t
  misc_feature (1153)..(1153): n is a, c, g, or t
  misc_feature (1155)..(1155): n is a, c, g, or t
  misc_feature (1188)..(1188): n is a, c, g, or t
  misc_feature (1194)..(1194): n is a, c, g, or t
  misc_feature (1203)..(1203): n is a, c, g, or t
  misc_feature (1206)..(1207): n is a, c, g, or t
  misc_feature (1218)..(1218): n is a, c, g, or t
  misc_feature (1222)..(1223): n is a, c, g, or t
  misc_feature (1227)..(1227): n is a, c, g, or t
  misc_feature (1230)..(1230): n is a, c, g, or t
  misc_feature (1234)..(1235): n is a, c, g, or t
  misc_feature (1238)..(1238): n is a, c, g, or t
  misc_feature (1247)..(1247): n is a, c, g, or t
  misc_feature (1249)..(1249): n is a, c, g, or t
  misc_feature (1270)..(1270): n is a, c, g, or t
  misc_feature (1276)..(1276): n is a, c, g, or t
  misc_feature (1278)..(1278): n is a, c, g, or t
  misc_feature (1293)..(1294): n is a, c, g, or t
  misc_feature (1296)..(1297): n is a, c, g, or t
  misc_feature (1307)..(1307): n is a, c, g, or t
  misc_feature (1311)..(1311): n is a, c, g, or t
  misc_feature (1329)..(1329): n is a, c, g, or t
  misc_feature (1344)..(1346): n is a, c, g, or t
  misc_feature (1369)..(1369): n is a, c, g, or t
  misc_feature (1372)..(1372): n is a, c, g, or t
  misc_feature (1374)..(1374): n is a, c, g, or t
  misc_feature (1379)..(1380): n is a, c, g, or t
  misc_feature (1383)..(1383): n is a, c, g, or t
  misc_feature (1385)..(1385): n is a, c, g, or t
  misc_feature (1388)..(1389): n is a, c, g, or t
  misc_feature (1391)..(1391): n is a, c, g, or t
  misc_feature (1398)..(1398): n is a, c, g, or t
  misc_feature (1404)..(1404): n is a, c, g, or t
  misc_feature (1410)..(1410): n is a, c, g, or t
tagagaaattactatgagaggatcgcatcaccatcaccatcacggatcctatttaggtgacactatagaatcgtcgacccacgcgtccggggccggtgaagggaaaggaaatagctctacgagcggcatcctgcctgcgttagcggcggtggaggaggaggcagagaggagtggagggcggagtagacggaggaggctgctgcagagaagaaagtgtcagagccggttcggctttagagtgtggtgaagggtacttttcatggtgcatggaaggaaagccaatgcgcaggtgtaccaacattcgaccaggagagactggaatggatgtaacaagccgctgcacccttggagaccccaacaaactgccagaaggggttccccaacctgcccgcatgccctatatctcagacaagcaccctcgacaaaccttggaagtgattaaccttctgagaaagcaccgggagctatgtgatgtggtgctagttgtgggcgccaagaagatatatgcccatcgagtcattttgtcagcctgtagtccctacttccgagctatgtttacaggagaattggcagagagccgtcagacagaagtagtgatccgagacattgacgagagggctatggaattactgattgactttgcgtatacctcccagataacagtagaagagggcaatgttcagactcttctgccagctgcttgcctcctccagctggcagaaatacaggaagcctgctgtgaattcttaaagagacaattagatccttctaactgcctgggcattcgggcttttgctgacacacattcatgtcgtgagttgctaaggatagcaaacaagttcaccccaacataactttcaagaagtgctgcagcatgttcgtttgcctttgctttaatccccaagttcctggtcggcacagtaggcctctgatcccctcatcaaaagtgatgaaaaantgcaaaanacttggttaaatgaaggctaaaaaactacctcntnttgccncnaanaacnaaccnctaatgccaaggaccaaggaanaaaaccccggaaaacctttcccaannnggggnaaattcctntttgcanttggngnttggggccatggnaaatccccttttcccgggtnaacnanttgntcccnnaaccantnaatggaaaaagggggccttcatgaaccaaaaanaaatcnaaattgggnccnngtttcttgaanaatnngttnatncccnnagnagcccgaangnatccctttttcccaaagggtngaaggnanaccccaaaaaaccgnngnnaagggttggncccncaaacccctggaaaaagnggtggaaaaatttgnnntttttttttggggggccaaaganggntntcccnnttntnaanntntcccaanaaaaangcattngtttttt

SEQ ID NO: 254 - DNA, 256 bp, Homo Sapiens
  misc_feature (2)..(2): n is a, c, g, or t
  misc_feature (7)..(7): n is a, c, g, or t
  misc_feature (10)..(11): n is a, c, g, or t
  misc_feature (20)..(20): n is a, c, g, or t
  misc_feature (24)..(25): n is a, c, g, or t
  misc_feature (27)..(27): n is a, c, g, or t
  misc_feature (30)..(30): n is a, c, g, or t
  misc_feature (32)..(32): n is a, c, g, or t
  misc_feature (40)..(40): n is a, c, g, or t
  misc_feature (43)..(43): n is a, c, g, or t
  misc_feature (46)..(46): n is a, c, g, or t
  misc_feature (53)..(53): n is a, c, g, or t
  misc_feature (59)..(59): n is a, c, g, or t
  misc_feature (68)..(70): n is a, c, g, or t
  misc_feature (73)..(73): n is a, c, g, or t
  misc_feature (75)..(75): n is a, c, g, or t
  misc_feature (82)..(82): n is a, c, g, or t
  misc_feature (86)..(87): n is a, c, g, or t
  misc_feature (95)..(95): n is a, c, g, or t
  misc_feature (97)..(97): n is a, c, g, or t
  misc_feature (102)..(103): n is a, c, g, or t
  misc_feature (105)..(105): n is a, c, g, or t
  misc_feature (107)..(107): n is a, c, g, or t
  misc_feature (109)..(109): n is a, c, g, or t
  misc_feature (111)..(111): n is a, c, g, or t
  misc_feature (113)..(115): n is a, c, g, or t
  misc_feature (117)..(118): n is a, c, g, or t
  misc_feature (126)..(126): n is a, c, g, or t
  misc_feature (136)..(136): n is a, c, g, or t
  misc_feature (138)..(138): n is a, c, g, or t
  misc_feature (147)..(147): n is a, c, g, or t
  misc_feature (149)..(149): n is a, c, g, or t
  misc_feature (151)..(151): n is a, c, g, or t
  misc_feature (156)..(156): n is a, c, g, or t
  misc_feature (164)..(167): n is a, c, g, or t
  misc_feature (170)..(170): n is a, c, g, or t
  misc_feature (180)..(180): n is a, c, g, or t
  misc_feature (183)..(184): n is a, c, g, or t
  misc_feature (186)..(187): n is a, c, g, or t
  misc_feature (197)..(197): n is a, c, g, or t
  misc_feature (199)..(199): n is a, c, g, or t
  misc_feature (201)..(202): n is a, c, g, or t
  misc_feature (205)..(210): n is a, c, g, or t
  misc_feature (213)..(214): n is a, c, g, or t
  misc_feature (217)..(217): n is a, c, g, or t
  misc_feature (219)..(222): n is a, c, g, or t
  misc_feature (226)..(227): n is a, c, g, or t
  misc_feature (230)..(231): n is a, c, g, or t
  misc_feature (234)..(234): n is a, c, g, or t
  misc_feature (236)..(236): n is a, c, g, or t
  misc_feature (238)..(238): n is a, c, g, or t
  misc_feature (240)..(242): n is a, c, g, or t
  misc_feature (244)..(244): n is a, c, g, or t
  misc_feature (247)..(249): n is a, c, g, or t
  misc_feature (252)..(252): n is a, c, g, or t
gnagganggnnggagtaaangagnngnggncntcattccngcntcnataatcncctcgntctctcccnnnccncnccccccncccnncgcgcaangngctcnncncncncncnnncnnaccccccngccccgcccncncgccccccncncncgcgncctcctcnnnncgnaggaaggtcnccnncnncgagcagccnantnncgnnnnnnagnnggngnnnncgannganngtngnangnnntnggnnnaanggtg

SEQ ID NO: 255 - DNA, 1225 bp, Homo Sapiens
  misc_feature (883)..(883): n is a, c, g, or t
  misc_feature (887)..(887): n is a, c, g, or t
  misc_feature (894)..(894): n is a, c, g, or t
  misc_feature (904)..(904): n is a, c, g, or t
  misc_feature (921)..(921): n is a, c, g, or t
  misc_feature (941)..(941): n is a, c, g, or t
  misc_feature (949)..(949): n is a, c, g, or t
  misc_feature (959)..(959): n is a, c, g, or t
  misc_feature (965)..(965): n is a, c, g, or t
  misc_feature (973)..(973): n is a, c, g, or t
  misc_feature (977)..(977): n is a, c, g, or t
  misc_feature (988)..(988): n is a, c, g, or t
  misc_feature (990)..(990): n is a, c, g, or t
  misc_feature (999)..(999): n is a, c, g, or t
  misc_feature (1003)..(1003): n is a, c, g, or t
  misc_feature (1011)..(1011): n is a, c, g, or t
  misc_feature (1024)..(1024): n is a, c, g, or t
  misc_feature (1029)..(1029): n is a, c, g, or t
  misc_feature (1032)..(1032): n is a, c, g, or t
  misc_feature (1041)..(1041): n is a, c, g, or t
  misc_feature (1046)..(1048): n is a, c, g, or t
  misc_feature (1070)..(1070): n is a, c, g, or t
  misc_feature (1087)..(1087): n is a, c, g, or t
  misc_feature (1090)..(1090): n is a, c, g, or t
  misc_feature (1094)..(1094): n is a, c, g, or t
  misc_feature (1098)..(1098): n is a, c, g, or t
  misc_feature (1107)..(1107): n is a, c, g, or t
  misc_feature (1109)..(1110): n is a, c, g, or t
  misc_feature (1133)..(1133): n is a, c, g, or t
  misc_feature (1139)..(1139): n is a, c, g, or t
  misc_feature (1147)..(1147): n is a, c, g, or t
  misc_feature (1152)..(1152): n is a, c, g, or t
  misc_feature (1161)..(1161): n is a, c, g, or t
  misc_feature (1165)..(1165): n is a, c, g, or t
  misc_feature (1172)..(1173): n is a, c, g, or t
  misc_feature (1175)..(1175): n is a, c, g, or t
  misc_feature (1183)..(1184): n is a, c, g, or t
  misc_feature (1194)..(1194): n is a, c, g, or t
  misc_feature (1201)..(1202): n is a, c, g, or t
  misc_feature (1204)..(1204): n is a, c, g, or t
  misc_feature (1213)..(1213): n is a, c, g, or t
tagagaaattactatgagaggatcgcatcaccatcaccatcacggatcctatttaggtgacactatagaatcgtcgacccacgcgtccgccaagatcaacgcgagcaagaatcagcaggatgacggtaaaatgtttattggaggcttgagctgggatacaagcaaaaaagatctgacagagtacttgtctcgatttggggaagttgtagactgcacaattaaaacagatccagtcactgggagatcaagaggatttggatttgtgcttttcaaagatgctgctagtgttgataaggttttggaactgaaagaacacaaactggatggcaaattgatagatcccaaaagggccaaagctttaaaagggaaagaacctcccaaaaaggtttttgtgggtggattgagcccggatacttctgaagaacaaattaaagaatattttggagcctttggagagattgaaaatattgaacttcccatggatacaaaaacaaatgaaagaagaggattttgttttatcacatatactgatgaagagccagtaaaaaaattgttagaaagcagataccatcaaattggttctgggaagtgtgaaatcaaagttgcacaacccaaagaggtatataggcagcaacagcaacaacaaaaaggtggaagaggtgctgcagctggtggacgaggtggtacgaggggtcgtggccgaggtcagggccaaaactggaaccaaggatttaataactattatgatcaaggatatggaaattacaatagtgcctatggtggtgatcaaaactatagtggctatggcggatatgattatactgggtataactatgggaactatggatatggacagggatatgcagactacagtggcccacanagcncttatgncaaggcatcncgaggggggggcaatcnccaaaccatttcccgccctnctaagggnaacttggganaaaacnggggggtntaanagtccggaaancnttaaaatgnctantttatttnaagaatcattaancaatngancgtaaaacnaaaannnaggacccggtttaccaaatggngattttttattggcttnagncccngttngccaaaggncnnaaaacctttacctttaagcctancccccnttctttanatggnaaaaacctnaaanttttctnntncttttggnncccggggccnaaagaanntnaaccttttnaactttacgggg

SEQ ID NO: 256 - DNA, 256 bp, Homo Sapiens
  misc_feature (1)..(3): n is a, c, g, or t
nnnctatgagaggatcgcatcaccatcaccatcacggatcctatttaggtgacactatagaatcgtcgacccacgcgtccgaagaatttcaggtgtcgtttcaggttcagaagtactgggaagtctgttcctttaatgaagtgcttgccagcaagtacgccaatgaaaatccaggggactttgtaaattacaacaaacgttttcttgctagggtttttcccagtccaatgagaattgattccagtaacatgaatcc

SEQ ID NO: 257 - DNA, 256 bp, Homo Sapiens
  misc_feature (2)..(2): n is a, c, g, or t
tnaactatgagaggatcgcatcaccatcaccatcacggatcctatttaggtgacactatagaatcgtcgacccacgcgtccgctaagatggcggcgacggccaggcggggctggggagctgcggctgttgccgccgggctgcgcaggcggttctgtcatatgttgaagaatccatacaccattaagaaacagcctctgcatcagtttgtacaaagaccacttttcccactacctgcagccttttatcacccagtga

SEQ ID NO: 258 - DNA, 256 bp, Homo Sapiens
ttatctatgagaggatcgcatcaccatcaccatcacggatcctatttaggtgacactatagaatcgtcgacccacgcgtccgcggacgcgtgggtgaccactgaagatcctggtgtcgccatgggccgccgccccgcccgttgttaccggtattgtaagaacaagccgtacccaaagtctcgcttctgccgaggtgtccctgatgccaagattcgcatttttgacctggggcggaaaaaggcaaaagtggatgagt

SEQ ID NO: 259 - DNA, 1200 bp, Homo Sapiens
  misc_feature (3)..(3): n is a, c, g, or t
  misc_feature (13)..(13): n is a, c, g, or t
  misc_feature (881)..(881): n is a, c, g, or t
  misc_feature (915)..(915): n is a, c, g, or t
  misc_feature (919)..(919): n is a, c, g, or t
  misc_feature (947)..(947): n is a, c, g, or t
  misc_feature (952)..(952): n is a, c, g, or t
  misc_feature (969)..(969): n is a, c, g, or t
  misc_feature (973)..(973): n is a, c, g, or t
  misc_feature (975)..(975): n is a, c, g, or t
  misc_feature (982)..(982): n is a, c, g, or t
  misc_feature (984)..(984): n is a, c, g, or t
  misc_feature (986)..(986): n is a, c, g, or t
  misc_feature (989)..(989): n is a, c, g, or t
  misc_feature (999)..(999): n is a, c, g, or t
  misc_feature (1005)..(1005): n is a, c, g, or t
  misc_feature (1008)..(1008): n is a, c, g, or t
  misc_feature (1033)..(1033): n is a, c, g, or t
  misc_feature (1041)..(1042): n is a, c, g, or t
  misc_feature (1053)..(1053): n is a, c, g, or t
  misc_feature (1055)..(1055): n is a, c, g, or t
  misc_feature (1078)..(1078): n is a, c, g, or t
  misc_feature (1091)..(1091): n is a, c, g, or t
  misc_feature (1093)..(1093): n is a, c, g, or t
  misc_feature (1096)..(1096): n is a, c, g, or t
  misc_feature (1104)..(1104): n is a, c, g, or t
  misc_feature (1113)..(1113): n is a, c, g, or t
  misc_feature (1117)..(1117): n is a, c, g, or t
  misc_feature (1120)..(1121): n is a, c, g, or t
  misc_feature (1124)..(1124): n is a, c, g, or t
  misc_feature (1126)..(1126): n is a, c, g, or t
  misc_feature (1131)..(1131): n is a, c, g, or t
  misc_feature (1133)..(1133): n is a, c, g, or t
  misc_feature (1137)..(1137): n is a, c, g, or t
  misc_feature (1139)..(1139): n is a, c, g, or t
  misc_feature (1143)..(1143): n is a, c, g, or t
  misc_feature (1145)..(1145): n is a, c, g, or t
  misc_feature (1147)..(1147): n is a, c, g, or t
  misc_feature (1149)..(1150): n is a, c, g, or t
  misc_feature (1163)..(1163): n is a, c, g, or t
  misc_feature (1165)..(1165): n is a, c, g, or t
  misc_feature (1168)..(1168): n is a, c, g, or t
  misc_feature (1173)..(1173): n is a, c, g, or t
  misc_feature (1175)..(1175): n is a, c, g, or t
  misc_feature (1177)..(1177): n is a, c, g, or t
  misc_feature (1180)..(1180): n is a, c, g, or t
  misc_feature (1189)..(1190): n is a, c, g, or t
  misc_feature (1192)..(1192): n is a, c, g, or t
  misc_feature (1194)..(1196): n is a, c, g, or t
  misc_feature (1198)..(1198): n is a, c, g, or t
ganttagagaganttaactatgagaggatcgcatcaccatcaccagtcacgggatcctatttaggtgacactatagaatcgtcgacccacgcgtccgtgaaggtccaggagcagatggccaactgccccaagttcgtccccgtggtgcccacatcacagcctatccccagcaacatccccaacaggtccaccttcgcctgcccgtactgtggtgcccgcaacctggaccagcaggagctggtgaagcactgtgtggaaagccaccgcagcgaccccaaccgcgtggtgtgccccatctgctcggcaatgccctggggggaccccagctacaagagcgccaacttcctgcagcacctgcttcaccgacacaagttctcctacgacacctttgtggactacagtattgacgaggaggccgccttccaggctgctctggccctgtctctctctgagaactgaagggaagcgcagccacccgcctgcgtctggggtcagggatgtccccgctcctgtgtcgcacctggcacctgctcgggagcgcacctcaccggactgagctcacaggaggagcctgcacccgcgcagaaggggagccggggccgagcctccgggcctgaatacgggccagccgccgaggccgccagagcagggccgcctggtcccaccggcgtcgctgggttcttcggtgcttctggccgagcaggcggcctacttgggcagggctggacgctgggacctggagctgccgccgtctcttcaaagccatgataccccctcgtgggaagaagggaccgacgcgcgagtcgcgctccgcagtcgagccgggaggaacccaggctgctgccctgcccagcccgaccctgcccccgccccgcttcacnttgcgcatttggtactggcttttgtgatacttangaancctggcatctttttctatattatccagnggganaatctttttcacgtttnatanancaaaaananancanttactcttcntattgnaanatctgtgtttgactaagaataaaantatttttnngggaaaatttnanaaaattatattttttaaaaaaanaaatcaaaaaaancnttngggggatnggggcaagnatgnaannaananggggnancttncnaaantnangnnaaccatggggttntnctnggggntngnccnggccccccnntntnnntngg

SEQ ID NO: 260 - DNA, 1710 bp, Homo Sapiens
  misc_feature (4)..(5): n is a, c, g, or t
  misc_feature (7)..(7): n is a, c, g, or t
  misc_feature (10)..(10): n is a, c, g, or t
  misc_feature (15)..(16): n is a, c, g, or t
  misc_feature (31)..(31): n is a, c, g, or t
  misc_feature (47)..(47): n is a, c, g, or t
  misc_feature (57)..(57): n is a, c, g, or t
  misc_feature (70)..(70): n is a, c, g, or t
  misc_feature (76)..(76): n is a, c, g, or t
  misc_feature (83)..(83): n is a, c, g, or t
  misc_feature (86)..(86): n is a, c, g, or t
  misc_feature (96)..(96): n is a, c, g, or t
  misc_feature (103)..(103): n is a, c, g, or t
  misc_feature (108)..(108): n is a, c, g, or t
  misc_feature (120)..(120): n is a, c, g, or t
  misc_feature (130)..(130): n is a, c, g, or t
  misc_feature (170)..(170): n is a, c, g, or t
  misc_feature (178)..(178): n is a, c, g, or t
  misc_feature (207)..(207): n is a, c, g, or t
  misc_feature (217)..(217): n is a, c, g, or t
  misc_feature (222)..(222): n is a, c, g, or t
  misc_feature (228)..(228): n is a, c, g, or t
  misc_feature (230)..(230): n is a, c, g, or t
  misc_feature (239)..(239): n is a, c, g, or t
  misc_feature (242)..(242): n is a, c, g, or t
  misc_feature (257)..(257): n is a, c, g, or t
  misc_feature (264)..(264): n is a, c, g, or t
  misc_feature (268)..(269): n is a, c, g, or t
  misc_feature (298)..(298): n is a, c, g, or t
  misc_feature (303)..(303): n is a, c, g, or t
  misc_feature (310)..(310): n is a, c, g, or t
  misc_feature (312)..(313): n is a, c, g, or t
  misc_feature (315)..(315): n is a, c, g, or t
  misc_feature (317)..(317): n is a, c, g, or t
  misc_feature (320)..(320): n is a, c, g, or t
  misc_feature (324)..(324): n is a, c, g, or t
  misc_feature (327)..(327): n is a, c, g, or t
  misc_feature (332)..(333): n is a, c, g, or t
  misc_feature (336)..(336): n is a, c, g, or t
  misc_feature (338)..(338): n is a, c, g, or t
  misc_feature (346)..(347): n is a, c, g, or t
  misc_feature (349)..(349): n is a, c, g, or t
  misc_feature (353)..(353): n is a, c, g, or t
  misc_feature (358)..(358): n is a, c, g, or t
  misc_feature (362)..(362): n is a, c, g, or t
  misc_feature (366)..(366): n is a, c, g, or t
  misc_feature (368)..(368): n is a, c, g, or t
  misc_feature (371)..(371): n is a, c, g, or t
  misc_feature (376)..(376): n is a, c, g, or t
  misc_feature (379)..(379): n is a, c, g, or t
  misc_feature (381)..(381): n is a, c, g, or t
  misc_feature (383)..(383): n is a, c, g, or t
  misc_feature (389)..(389): n is a, c, g, or t
  misc_feature (394)..(394): n is a, c, g, or t
  misc_feature (396)..(396): n is a, c, g, or t
  misc_feature (400)..(400): n is a, c, g, or t
  misc_feature (402)..(402): n is a, c, g, or t
  misc_feature (404)..(404): n is a, c, g, or t
  misc_feature (409)..(409): n is a, c, g, or t
  misc_feature (412)..(414): n is a, c, g, or t
  misc_feature (416)..(416): n is a, c, g, or t
  misc_feature (418)..(418): n is a, c, g, or t
  misc_feature (421)..(423): n is a, c, g, or t
  misc_feature (428)..(430): n is a, c, g, or t
  misc_feature (435)..(435): n is a, c, g, or t
  misc_feature (438)..(438): n is a, c, g, or t
  misc_feature (445)..(446): n is a, c, g, or t
  misc_feature (453)..(454): n is a, c, g, or t
  misc_feature (458)..(458): n is a, c, g, or t
  misc_feature (460)..(461): n is a, c, g, or t
  misc_feature (464)..(464): n is a, c, g, or t
  misc_feature (466)..(467): n is a, c, g, or t
  misc_feature (474)..(474): n is a, c, g, or t
  misc_feature (478)..(479): n is a, c, g, or t
  misc_feature (482)..(482): n is a, c, g, or t
  misc_feature (486)..(486): n is a, c, g, or t
  misc_feature (488)..(488): n is a, c, g, or t
  misc_feature (496)..(497): n is a, c, g, or t
  misc_feature (502)..(502): n is a, c, g, or t
  misc_feature (506)..(507): n is a, c, g, or t
  misc_feature (509)..(512): n is a, c, g, or t
  misc_feature (515)..(517): n is a, c, g, or t
  misc_feature (524)..(524): n is a, c, g, or t
  misc_feature (526)..(526): n is a, c, g, or t
  misc_feature (530)..(531): n is a, c, g, or t
  misc_feature (534)..(534): n is a, c, g, or t
  misc_feature (536)..(536): n is a, c, g, or t
  misc_feature (540)..(541): n is a, c, g, or t
  misc_feature (543)..(543): n is a, c, g, or t
  misc_feature (546)..(547): n is a, c, g, or t
  misc_feature (550)..(550): n is a, c, g, or t
  misc_feature (553)..(553): n is a, c, g, or t
  misc_feature (559)..(559): n is a, c, g, or t
  misc_feature (561)..(561): n is a, c, g, or t
  misc_feature (570)..(570): n is a, c, g, or t
  misc_feature (574)..(575): n is a, c, g, or t
  misc_feature (577)..(578): n is a, c, g, or t
  misc_feature (581)..(582): n is a, c, g, or t
  misc_feature (586)..(586): n is a, c, g, or t
  misc_feature (588)..(589): n is a, c, g, or t
  misc_feature (593)..(593): n is a, c, g, or t
  misc_feature (599)..(599): n is a, c, g, or t
  misc_feature (603)..(604): n is a, c, g, or t
  misc_feature (607)..(607): n is a, c, g, or t
  misc_feature (612)..(612): n is a, c, g, or t
  misc_feature (624)..(624): n is a, c, g, or t
  misc_feature (626)..(626): n is a, c, g, or t
  misc_feature (631)..(631): n is a, c, g, or t
  misc_feature (638)..(640): n is a, c, g, or t
  misc_feature (643)..(643): n is a, c, g, or t
  misc_feature (647)..(647): n is a, c, g, or t
  misc_feature (650)..(650): n is a, c, g, or t
  misc_feature (657)..(658): n is a, c, g, or t
  misc_feature (661)..(662): n is a, c, g, or t
  misc_feature (664)..(664): n is a, c, g, or t
  misc_feature (667)..(667): n is a, c, g, or t
  misc_feature (671)..(672): n is a, c, g, or t
  misc_feature (675)..(676): n is a, c, g, or t
  misc_feature (679)..(679): n is a, c, g, or t
  misc_feature (684)..(685): n is a, c, g, or t
  misc_feature (688)..(688): n is a, c, g, or t
  misc_feature (690)..(693): n is a, c, g, or t
  misc_feature (695)..(695): n is a, c, g, or t
  misc_feature (697)..(698): n is a, c, g, or t
  misc_feature (705)..(705): n is a, c, g, or t
  misc_feature (707)..(709): n is a, c, g, or t
  misc_feature (712)..(712): n is a, c, g, or t
  misc_feature (715)..(715): n is a, c, g, or t
  misc_feature (723)..(724): n is a, c, g, or t
  misc_feature (730)..(730): n is a, c, g, or t
  misc_feature (734)..(734): n is a, c, g, or t
  misc_feature (737)..(737): n is a, c, g, or t
  misc_feature (740)..(740): n is a, c, g, or t
  misc_feature (742)..(742): n is a, c, g, or t
  misc_feature (747)..(747): n is a, c, g, or t
  misc_feature (753)..(755): n is a, c, g, or t
  misc_feature (762)..(762): n is a, c, g, or t
  misc_feature (766)..(766): n is a, c, g, or t
  misc_feature (768)..(769): n is a, c, g, or t
  misc_feature (771)..(771): n is a, c, g, or t
  misc_feature (779)..(781): n is a, c, g, or t
  misc_feature (783)..(783): n is a, c, g, or t
  misc_feature (785)..(787): n is a, c, g, or t
  misc_feature (800)..(801): n is a, c, g, or t
  misc_feature (806)..(806): n is a, c, g, or t
  misc_feature (809)..(811): n is a, c, g, or t
  misc_feature (815)..(815): n is a, c, g, or t
  misc_feature (819)..(819): n is a, c, g, or t
  misc_feature (822)..(824): n is a, c, g, or t
  misc_feature (826)..(826): n is a, c, g, or t
  misc_feature (829)..(829): n is a, c, g, or t
  misc_feature (834)..(835): n is a, c, g, or t
  misc_feature (837)..(837): n is a, c, g, or t
  misc_feature (843)..(843): n is a, c, g, or t
  misc_feature (845)..(847): n is a, c, g, or t
  misc_feature (850)..(852): n is a, c, g, or t
  misc_feature (861)..(861): n is a, c, g, or t
  misc_feature (865)..(865): n is a, c, g, or t
  misc_feature (867)..(868): n is a, c, g, or t
  misc_feature (870)..(871): n is a, c, g, or t
  misc_feature (875)..(875): n is a, c, g, or t
  misc_feature (877)..(877): n is a, c, g, or t
  misc_feature (880)..(880): n is a, c, g, or t
  misc_feature (883)..(883): n is a, c, g, or t
  misc_feature (887)..(888): n is a, c, g, or t
  misc_feature (891)..(894): n is a, c, g, or t
  misc_feature (896)..(897): n is a, c, g, or t
  misc_feature (900)..(901): n is a, c, g, or t
  misc_feature (908)..(908): n is a, c, g, or t
  misc_feature (912)..(913): n is a, c, g, or t
  misc_feature (915)..(916): n is a, c, g, or t
  misc_feature (918)..(918): n is a, c, g, or t
  misc_feature (921)..(921): n is a, c, g, or t
  misc_feature (924)..(925): n is a, c, g, or t
  misc_feature (927)..(927): n is a, c, g, or t
  misc_feature (930)..(930): n is a, c, g, or t
  misc_feature (934)..(934): n is a, c, g, or t
  misc_feature (941)..(942): n is a, c, g, or t
  misc_feature (949)..(949): n is a, c, g, or t
  misc_feature (953)..(953): n is a, c, g, or t
  misc_feature (965)..(966): n is a, c, g, or t
  misc_feature (972)..(972): n is a, c, g, or t
  misc_feature (980)..(980): n is a, c, g, or t
  misc_feature (984)..(984): n is a, c, g, or t
  misc_feature (986)..(986): n is a, c, g, or t
  misc_feature (993)..(993): n is a, c, g, or t
  misc_feature (998)..(998): n is a, c, g, or t
  misc_feature (1002)..(1002): n is a, c, g, or t
  misc_feature (1005)..(1009): n is a, c, g, or t
  misc_feature (1011)..(1011): n is a, c, g, or t
  misc_feature (1013)..(1014): n is a, c, g, or t
  misc_feature (1016)..(1016): n is a, c, g, or t
  misc_feature (1021)..(1021): n is a, c, g, or t
  misc_feature (1023)..(1023): n is a, c, g, or t
  misc_feature (1027)..(1027): n is a, c, g, or t
  misc_feature (1031)..(1032): n is a, c, g, or t
  misc_feature (1039)..(1039): n is a, c, g, or t
  misc_feature (1044)..(1044): n is a, c, g, or t
  misc_feature (1049)..(1049): n is a, c, g, or t
  misc_feature (1055)..(1055): n is a, c, g, or t
  misc_feature (1057)..(1057): n is a, c, g, or t
  misc_feature (1064)..(1064): n is a, c, g, or t
  misc_feature (1070)..(1070): n is a, c, g, or t
  misc_feature (1073)..(1073): n is a, c, g, or t
  misc_feature (1078)..(1079): n is a, c, g, or t
  misc_feature (1082)..(1085): n is a, c, g, or t
  misc_feature (1089)..(1089): n is a, c, g, or t
  misc_feature (1091)..(1091): n is a, c, g, or t
  misc_feature (1093)..(1093): n is a, c, g, or t
  misc_feature (1096)..(1096): n is a, c, g, or t
  misc_feature (1100)..(1100): n is a, c, g, or t
  misc_feature (1104)..(1104): n is a, c, g, or t
  misc_feature (1108)..(1108): n is a, c, g, or t
  misc_feature (1110)..(1111): n is a, c, g, or t
  misc_feature (1117)..(1117): n is a, c, g, or t
  misc_feature (1120)..(1121): n is a, c, g, or t
  misc_feature (1123)..(1123): n is a, c, g, or t
  misc_feature (1125)..(1128): n is a, c, g, or t
  misc_feature (1134)..(1134): n is a, c, g, or t
  misc_feature (1136)..(1136): n is a, c, g, or t
  misc_feature (1139)..(1139): n is a, c, g, or t
  misc_feature (1144)..(1144): n is a, c, g, or t
  misc_feature (1146)..(1147): n is a, c, g, or t
  misc_feature (1151)..(1151): n is a, c, g, or t
  misc_feature (1154)..(1155): n is a, c, g, or t
  misc_feature (1157)..(1157): n is a, c, g, or t
  misc_feature (1163)..(1163): n is a, c, g, or t
  misc_feature (1169)..(1169): n is a, c, g, or t
  misc_feature (1171)..(1172): n is a, c, g, or t
  misc_feature (1175)..(1175): n is a, c, g, or t
  misc_feature (1177)..(1179): n is a, c, g, or t
  misc_feature (1182)..(1182): n is a, c, g, or t
  misc_feature (1185)..(1186): n is a, c, g, or t
  misc_feature (1188)..(1188): n is a, c, g, or t
  misc_feature (1190)..(1191): n is a, c, g, or t
  misc_feature (1198)..(1198): n is a, c, g, or t
  misc_feature (1202)..(1202): n is a, c, g, or t
  misc_feature (1204)..(1204): n is a, c, g, or t
  misc_feature (1206)..(1206): n is a, c, g, or t
  misc_feature (1211)..(1211): n is a, c, g, or t
  misc_feature (1214)..(1214): n is a, c, g, or t
  misc_feature (1218)..(1218): n is a, c, g, or t
  misc_feature (1220)..(1220): n is a, c, g, or t
  misc_feature (1223)..(1223): n is a, c, g, or t
  misc_feature (1225)..(1225): n is a, c, g, or t
  misc_feature (1227)..(1229): n is a, c, g, or t
  misc_feature (1232)..(1233): n is a, c, g, or t
  misc_feature (1235)..(1235): n is a, c, g, or t
  misc_feature (1242)..(1242): n is a, c, g, or t
  misc_feature (1253)..(1253): n is a, c, g, or t
  misc_feature (1259)..(1259): n is a, c, g, or t
  misc_feature (1267)..(1268): n is a, c, g, or t
  misc_feature (1274)..(1276): n is a, c, g, or t
  misc_feature (1278)..(1279): n is a, c, g, or t
  misc_feature (1285)..(1286): n is a, c, g, or t
  misc_feature (1289)..(1290): n is a, c, g, or t
  misc_feature (1301)..(1301): n is a, c, g, or t
  misc_feature (1307)..(1307): n is a, c, g, or t
  misc_feature (1310)..(1311): n is a, c, g, or t
  misc_feature (1313)..(1315): n is a, c, g, or t
  misc_feature (1319)..(1320): n is a, c, g, or t
  misc_feature (1322)..(1326): n is a, c, g, or t
  misc_feature (1331)..(1331): n is a, c, g, or t
  misc_feature (1333)..(1333): n is a, c, g, or t
  misc_feature (1337)..(1339): n is a, c, g, or t
  misc_feature (1342)..(1343): n is a, c, g, or t
  misc_feature (1346)..(1346): n is a, c, g, or t
  misc_feature (1352)..(1352): n is a, c, g, or t
  misc_feature (1362)..(1362): n is a, c, g, or t
  misc_feature (1375)..(1375): n is a, c, g, or t
  misc_feature (1379)..(1379): n is a, c, g, or t
  misc_feature (1383)..(1383): n is a, c, g, or t
  misc_feature (1387)..(1387): n is a, c, g, or t
  misc_feature (1394)..(1394): n is a, c, g, or t
  misc_feature (1396)..(1396): n is a, c, g, or t
  misc_feature (1400)..(1402): n is a, c, g, or t
  misc_feature (1404)..(1405): n is a, c, g, or t
  misc_feature (1414)..(1414): n is a, c, g, or t
  misc_feature (1417)..(1417): n is a, c, g, or t
  misc_feature (1420)..(1420): n is a, c, g, or t
  misc_feature (1422)..(1424): n is a, c, g, or t
  misc_feature (1426)..(1426): n is a, c, g, or t
  misc_feature (1429)..(1429): n is a, c, g, or t
  misc_feature (1432)..(1433): n is a, c, g, or t
  misc_feature (1435)..(1436): n is a, c, g, or t
  misc_feature (1443)..(1444): n is a, c, g, or t
  misc_feature (1446)..(1447): n is a, c, g, or t
  misc_feature (1452)..(1452): n is a, c, g, or t
  misc_feature (1455)..(1457): n is a, c, g, or t
  misc_feature (1460)..(1460): n is a, c, g, or t
  misc_feature (1462)..(1463): n is a, c, g, or t
  misc_feature (1468)..(1468): n is a, c, g, or t
  misc_feature (1472)..(1472): n is a, c, g, or t
  misc_feature (1478)..(1479): n is a, c, g, or t
  misc_feature (1484)..(1484): n is a, c, g, or t
  misc_feature (1486)..(1489): n is a, c, g, or t
  misc_feature (1492)..(1492): n is a, c, g, or t
  misc_feature (1502)..(1502): n is a, c, g, or t
  misc_feature (1510)..(1510): n is a, c, g, or t
  misc_feature (1517)..(1517): n is a, c, g, or t
  misc_feature (1527)..(1527): n is a, c, g, or t
  misc_feature (1530)..(1530): n is a, c, g, or t
  misc_feature (1533)..(1534): n is a, c, g, or t
  misc_feature (1537)..(1537): n is a, c, g, or t
  misc_feature (1541)..(1543): n is a, c, g, or t
  misc_feature (1545)..(1548): n is a, c, g, or t
  misc_feature (1552)..(1552): n is a, c, g, or t
  misc_feature (1555)..(1555): n is a, c, g, or t
  misc_feature (1557)..(1557): n is a, c, g, or t
  misc_feature (1562)..(1562): n is a, c, g, or t
  misc_feature (1566)..(1566): n is a, c, g, or t
  misc_feature (1574)..(1574): n is a, c, g, or t
  misc_feature (1578)..(1578): n is a, c, g, or t
  misc_feature (1584)..(1584): n is a, c, g, or t
  misc_feature (1586)..(1586): n is a, c, g, or t
  misc_feature (1590)..(1591): n is a, c, g, or t
  misc_feature (1596)..(1596): n is a, c, g, or t
  misc_feature (1599)..(1599): n is a, c, g, or t
  misc_feature (1602)..(1602): n is a, c, g, or t
  misc_feature (1605)..(1606): n is a, c, g, or t
  misc_feature (1611)..(1611): n is a, c, g, or t
  misc_feature (1613)..(1613): n is a, c, g, or t
  misc_feature (1616)..(1617): n is a, c, g, or t
  misc_feature (1626)..(1629): n is a, c, g, or t
  misc_feature (1634)..(1634): n is a, c, g, or t
  misc_feature (1636)..(1636): n is a, c, g, or t
  misc_feature (1639)..(1639): n is a, c, g, or t
  misc_feature (1641)..(1641): n is a, c, g, or t
  misc_feature (1654)..(1654): n is a, c, g, or t
  misc_feature (1660)..(1660): n is a, c, g, or t
  misc_feature (1669)..(1669): n is a, c, g, or t
  misc_feature (1673)..(1673): n is a, c, g, or t
  misc_feature (1684)..(1686): n is a, c, g, or t
  misc_feature (1689)..(1690): n is a, c, g, or t
  misc_feature (1693)..(1693): n is a, c, g, or t
  misc_feature (1695)..(1696): n is a, c, g, or t
  misc_feature (1700)..(1700): n is a, c, g, or t
  misc_feature (1702)..(1702): n is a, c, g, or t
  misc_feature (1706)..(1706): n is a, c, g, or t
  misc_feature (1709)..(1710): n is a, c, g, or t
ccannanagnaaatnntttgggggggtcgcntccccctcccccctcncgggatcctnttttggtgagacnataganatcgttnganccacgcgttncgtgcanacgancggaggctgggnagcgtcgcancgcatgcttcggtgctggaacccacccggcaggcgcaggncacccacncccggtctctgagcggctgccccccgcancattgcacgngcgancctcgncngcccactgncancggccgcgggactgnctgggantggnncggccgagggcactgctcctcggtgcatngctgntcgggcncnntngnccnaagnaanccagnnttnancggtcgtnngncacntccgnggancctnantgnacatnatnancnactgtntgtanancagngntnatatncannnantntcnnnaacgnnnatagnganaatcaannagtccannttcnanngancnnttctctntaannaanaggnanctacggtnnatcanctgnncnnnnacnnnacaacananaccnnatncnatanncnaannttnggnactgcntnataaatatntcgnnannagnnatcnanntcanaaaatncttnnaantgatnagaaataacacntntgtanataaatnnnganaaantanaatatannccnngnaanaaanntanntanaaacnntanannnncngnnatacctntnnnagnagnaaaatttnncccaanactncantcnanataancctaannntccctcncctncnnanagaatagnnnanannnattggtacttagnntaaanttnnnaacnaaanctnnntnttncaatnnanccatgnannnccnnnattaatttnatgncnntnncaantnaanttntcannagnnnnannctnntaaaaanaaannanntnacntcnncntanaatnatggtcnntaccttnggtncaaagaaatctnnactctntccctttngaanangaaactntttcnctcnagnnnnntntnnancacantnacanccanngcctccntcacngaaancaccangncaatctntaacanagnaatanntcnnnnaatngntngantctnatcncttnanntgtctnctnncngnnnnctaatnangantcaangnnattnagnnanatgcantatcgncnnttntnnnatnttnncnannttccaanaacntntnttctncantacntnaantngnnnccnncnccaaacnacaagcctcgnatagtnatttctannatttannncnntcattnnacnntttaaattctnatattnctnntnnnattnntnnnnncctanancctnnnatnnatnttattncctacctctnttctcacattaantaanatanactnctaagcnanaaannncnnaattctatncanatntnnngnctnttnntnntttgtcnnannaaatncannntcntnntgtancgtngtatannctaantnnnnatnataatcaagnatctcacntcatttntcttttgtantanttnntcnactnnnannnnaatngantntatanattnttctcatnttanttcatnantagnnccttnatngancannaacantncgnngtctacaannnntttantntcngnaaatatatctgtnctgaantactatcanccantcttccaacannnaannatnannatantnattnttnn

SEQ ID NO: 261 - DNA, 1200 bp, Homo Sapiens
  misc_feature (2)..(2): n is a, c, g, or t
  misc_feature (13)..(14): n is a, c, g, or t
  misc_feature (26)..(26): n is a, c, g, or t
  misc_feature (73)..(73): n is a, c, g, or t
  misc_feature (82)..(82): n is a, c, g, or t
  misc_feature (84)..(84): n is a, c, g, or t
  misc_feature (97)..(97): n is a, c, g, or t
  misc_feature (103)..(103): n is a, c, g, or t
  misc_feature (108)..(108): n is a, c, g, or t
  misc_feature (122)..(123): n is a, c, g, or t
  misc_feature (133)..(134): n is a, c, g, or t
  misc_feature (136)..(136): n is a, c, g, or t
  misc_feature (146)..(147): n is a, c, g, or t
  misc_feature (155)..(155): n is a, c, g, or t
  misc_feature (160)..(161): n is a, c, g, or t
  misc_feature (167)..(167): n is a, c, g, or t
  misc_feature (170)..(170): n is a, c, g, or t
  misc_feature (173)..(174): n is a, c, g, or t
  misc_feature (179)..(179): n is a, c, g, or t
  misc_feature (187)..(188): n is a, c, g, or t
  misc_feature (190)..(190): n is a, c, g, or t
  misc_feature (197)..(197): n is a, c, g, or t
  misc_feature (206)..(206): n is a, c, g, or t
  misc_feature (215)..(216): n is a, c, g, or t
  misc_feature (225)..(225): n is a, c, g, or t
  misc_feature (245)..(245): n is a, c, g, or t
  misc_feature (249)..(249): n is a, c, g, or t
  misc_feature (255)..(255): n is a, c, g, or t
  misc_feature (271)..(271): n is a, c, g, or t
  misc_feature (280)..(280): n is a, c, g, or t
  misc_feature (283)..(283): n is a, c, g, or t
  misc_feature (295)..(296): n is a, c, g, or t
  misc_feature (298)..(298): n is a, c, g, or t
  misc_feature (303)..(303): n is a, c, g, or t
  misc_feature (305)..(305): n is a, c, g, or t
  misc_feature (308)..(308): n is a, c, g, or t
  misc_feature (315)..(316): n is a, c, g, or t
  misc_feature (321)..(321): n is a, c, g, or t
  misc_feature (326)..(327): n is a, c, g, or t
  misc_feature (333)..(333): n is a, c, g, or t
  misc_feature (335)..(335): n is a, c, g, or t
  misc_feature (339)..(339): n is a, c, g, or t
  misc_feature (351)..(351): n is a, c, g, or t
  misc_feature (354)..(354): n is a, c, g, or t
  misc_feature (358)..(358): n is a, c, g, or t
  misc_feature (362)..(362): n is a, c, g, or t
  misc_feature (365)..(365): n is a, c, g, or t
  misc_feature (367)..(367): n is a, c, g, or t
  misc_feature (370)..(370): n is a, c, g, or t
  misc_feature (384)..(385): n is a, c, g, or t
  misc_feature (388)..(388): n is a, c, g, or t
  misc_feature (402)..(402): n is a, c, g, or t
  misc_feature (407)..(408): n is a, c, g, or t
  misc_feature (413)..(414): n is a, c, g, or t
  misc_feature (422)..(422): n is a, c, g, or t
  misc_feature (427)..(427): n is a, c, g, or t
  misc_feature (433)..(433): n is a, c, g, or t
  misc_feature (440)..(440): n is a, c, g, or t
  misc_feature (451)..(451): n is a, c, g, or t
  misc_feature (476)..(476): n is a, c, g, or t
  misc_feature (493)..(493): n is a, c, g, or t
  misc_feature (498)..(499): n is a, c, g, or t
  misc_feature (501)..(501): n is a, c, g, or t
  misc_feature (505)..(505): n is a, c, g, or t
  misc_feature (508)..(508): n is a, c, g, or t
  misc_feature (511)..(511): n is a, c, g, or t
  misc_feature (513)..(513): n is a, c, g, or t
  misc_feature (526)..(526): n is a, c, g, or t
  misc_feature (529)..(531): n is a, c, g, or t
  misc_feature (534)..(534): n is a, c, g, or t
  misc_feature (536)..(536): n is a, c, g, or t
  misc_feature (543)..(543): n is a, c, g, or t
  misc_feature (545)..(545): n is a, c, g, or t
  misc_feature (548)..(548): n is a, c, g, or t
  misc_feature (550)..(550): n is a, c, g, or t
  misc_feature (565)..(565): n is a, c, g, or t
  misc_feature (567)..(567): n is a, c, g, or t
  misc_feature (575)..(575): n is a, c, g, or t
  misc_feature (584)..(584): n is a, c, g, or t
  misc_feature (613)..(613): n is a, c, g, or t
  misc_feature (617)..(617): n is a, c, g, or t
  misc_feature (620)..(620): n is a, c, g, or t
  misc_feature (633)..(633): n is a, c, g, or t
  misc_feature (637)..(637): n is a, c, g, or t
  misc_feature (642)..(642): n is a, c, g, or t
  misc_feature (648)..(648): n is a, c, g, or t
  misc_feature (664)..(664): n is a, c, g, or t
  misc_feature (669)..(669): n is a, c, g, or t
  misc_feature (674)..(674): n is a, c, g, or t
  misc_feature (677)..(677): n is a, c, g, or t
  misc_feature (684)..(685): n is a, c, g, or t
  misc_feature (690)..(690): n is a, c, g, or t
  misc_feature (701)..(701): n is a, c, g, or t
  misc_feature (704)..(704): n is a, c, g, or t
  misc_feature (706)..(706): n is a, c, g, or t
  misc_feature (711)..(711): n is a, c, g, or t
  misc_feature (719)..(719): n is a, c, g, or t
  misc_feature (723)..(723): n is a, c, g, or t
  misc_feature (726)..(726): n is a, c, g, or t
  misc_feature (737)..(737): n is a, c, g, or t
  misc_feature (740)..(740): n is a, c, g, or t
  misc_feature (749)..(749): n is a, c, g, or t
  misc_feature (751)..(751): n is a, c, g, or t
  misc_feature (753)..(753): n is a, c, g, or t
  misc_feature (764)..(764): n is a, c, g, or t
  misc_feature (773)..(773): n is a, c, g, or t
  misc_feature (784)..(785): n is a, c, g, or t
  misc_feature (790)..(791): n is a, c, g, or t
  misc_feature (796)..(798): n is a, c, g, or t
  misc_feature (800)..(800): n is a, c, g, or t
  misc_feature (802)..(802): n is a, c, g, or t
  misc_feature (804)..(805): n is a, c, g, or t
  misc_feature (814)..(814): n is a, c, g, or t
  misc_feature (816)..(816): n is a, c, g, or t
  misc_feature (822)..(823): n is a, c, g, or t
  misc_feature (825)..(825): n is a, c, g, or t
  misc_feature (837)..(837): n is a, c, g, or t
  misc_feature (846)..(846): n is a, c, g, or t
  misc_feature (853)..(853): n is a, c, g, or t
  misc_feature (856)..(857): n is a, c, g, or t
  misc_feature (859)..(859): n is a, c, g, or t
  misc_feature (867)..(867): n is a, c, g, or t
  misc_feature (871)..(871): n is a, c, g, or t
  misc_feature (875)..(875): n is a, c, g, or t
  misc_feature (877)..(878): n is a, c, g, or t
  misc_feature (884)..(884): n is a, c, g, or t
  misc_feature (889)..(889): n is a, c, g, or t
  misc_feature (891)..(891): n is a, c, g, or t
  misc_feature (893)..(893): n is a, c, g, or t
  misc_feature (898)..(898): n is a, c, g, or t
  misc_feature (904)..(904): n is a, c, g, or t
  misc_feature (906)..(907): n is a, c, g, or t
  misc_feature (909)..(909): n is a, c, g, or t
  misc_feature (914)..(914): n is a, c, g, or t
  misc_feature (917)..(917): n is a, c, g, or t
  misc_feature (919)..(919): n is a, c, g, or t
  misc_feature (921)..(921): n is a, c, g, or t
  misc_feature (931)..(931): n is a, c, g, or t
  misc_feature (943)..(943): n is a, c, g, or t
  misc_feature (946)..(946): n is a, c, g, or t
  misc_feature (948)..(948): n is a, c, g, or t
  misc_feature (955)..(955): n is a, c, g, or t
  misc_feature (959)..(959): n is a, c, g, or t
  misc_feature (962)..(962): n is a, c, g, or t
  misc_feature (967)..(967): n is a, c, g, or t
  misc_feature (970)..(970): n is a, c, g, or t
  misc_feature (973)..(974): n is a, c, g, or t
  misc_feature (977)..(977): n is a, c, g, or t
  misc_feature (983)..(983): n is a, c, g, or t
  misc_feature (986)..(986): n is a, c, g, or t
  misc_feature (988)..(988): n is a, c, g, or t
  misc_feature (994)..(994): n is a, c, g, or t
  misc_feature (1001)..(1001): n is a, c, g, or t
  misc_feature (1004)..(1004): n is a, c, g, or t
  misc_feature (1006)..(1008): n is a, c, g, or t
  misc_feature (1012)..(1013): n is a, c, g, or t
  misc_feature (1015)..(1015): n is a, c, g, or t
  misc_feature (1017)..(1017): n is a, c, g, or t
  misc_feature (1021)..(1021): n is a, c, g, or t
  misc_feature (1026)..(1026): n is a, c, g, or t
  misc_feature (1033)..(1034): n is a, c, g, or t
  misc_feature (1036)..(1036): n is a, c, g, or t
  misc_feature (1041)..(1041): n is a, c, g, or t
  misc_feature (1044)..(1044): n is a, c, g, or t
  misc_feature (1046)..(1046): n is a, c, g, or t
  misc_feature (1057)..(1057): n is a, c, g, or t
  misc_feature (1064)..(1066): n is a, c, g, or t
  misc_feature (1071)..(1071): n is a, c, g, or t
  misc_feature (1075)..(1075): n is a, c, g, or t
  misc_feature (1077)..(1078): n is a, c, g, or t
  misc_feature (1081)..(1081): n is a, c, g, or t
  misc_feature (1086)..(1086): n is a, c, g, or t
  misc_feature (1089)..(1090): n is a, c, g, or t
  misc_feature (1092)..(1093): n is a, c, g, or t
  misc_feature (1099)..(1099): n is a, c, g, or t
  misc_feature (1109)..(1109): n is a, c, g, or t
  misc_feature (1115)..(1115): n is a, c, g, or t
  misc_feature (1117)..(1117): n is a, c, g, or t
  misc_feature (1119)..(1119): n is a, c, g, or t
  misc_feature (1122)..(1123): n is a, c, g, or t
  misc_feature (1127)..(1128): n is a, c, g, or t
  misc_feature (1132)..(1132): n is a, c, g, or t
  misc_feature (1134)..(1135): n is a, c, g, or t
  misc_feature (1137)..(1138): n is a, c, g, or t
  misc_feature (1140)..(1140): n is a, c, g, or t
  misc_feature (1144)..(1144): n is a, c, g, or t
  misc_feature (1147)..(1148): n is a, c, g, or t
  misc_feature (1153)..(1153): n is a, c, g, or t
  misc_feature (1156)..(1157): n is a, c, g, or t
  misc_feature (1164)..(1164): n is a, c, g, or t
  misc_feature (1173)..(1174): n is a, c, g, or t
  misc_feature (1180)..(1180): n is a, c, g, or t
  misc_feature (1183)..(1184): n is a, c, g, or t
  misc_feature (1187)..(1187): n is a, c, g, or t
  misc_feature (1189)..(1189): n is a, c, g, or t
  misc_feature (1191)..(1191): n is a, c, g, or t
  misc_feature (1200)..(1200): n is a, c, g, or t
antagagaaattnntatgagaggatngccttcaccatccccatcacgggatcctatttaggtgacactataanaaatcgtcnanccacgcgttccgnaccaancgatncgcggacgcatgtnngccaagcggnngnatagacaacnncgaatgcnggatnncctggnccncgnngccancatggcgnngngacaggngctgggccncggcctgcnnctggtctcnagcgctgctgctgcgcttcncggntaagcncggacgggcctactgnttgaggcgnccnggcccggcggcnngntgtgncngcnggaagcnnccatnttggnncgcaananaggntgcgtagcctcncangggngggntcngnctncctaaccgtctccnnttnttcagccagtcggnggccnngctgnngggcgcgnattgnagcgtnagttcangtatgcggaanctggagctgcgcgggcccttgcagncggtcagtctttctgtncttcnntntagnggnggncntcatcgaggaaanacnnnttnanagccggnangcngnctcagcctgttcacnanatccaggnaatttttancccataaaagcaagccggagcctgaccanttgnaanccatacgcttgcngganttttnggctgnaaagagtatctgatanggcantaccnttngtttaannggctncaatgctgctnctntntaaantccacaangccnacntttgcccccanaancctgcaaantnanaaaagaaacanccggttttnctttctaaggnntaggnnccacnnnancnanntgccacccnanaaaaanngnctgaaagccganctttccagngggctcnctnncntttccccntttnggcnannaaaaangaaantngnaaaantcttcnannangttcnctncnancaaaacctcnttcttttaaaancantnaatccantaanctnggtcnccntcnntanccttanatngncttttnctggttnaancnnngaanncntntctnttaanaaaaaanncntttanaantntctcaatcaantaatccnnnctccnactnannaanataangtnnannttcacngcatattacnttcttncnanttnnagtnnattntnngnncnctgntannattanacnnttaagtntatctcttnncatatncanncantnanagttgttan

SEQ ID NO: 262 - DNA, 256 bp, Homo Sapiens
  misc_feature (5)..(5): n is a, c, g, or t
ttaangaggagaattaactatgagaggatcgcatcaccatcaccatcacggatcctatttaggtgacactatagaatcgtcgacccacgcgtccgcccacgcgtccgcccacgcgtccgatggaccagaaccatccattgaggttttccagccatcaaataaggaaggatttgggctgggtcttcagttgaaaaagatcctgggtatgtttacatcccaacaatggaaacatctgagcaatgatttcttgaagacc

SEQ ID NO: 263 - DNA, 256 bp, Homo Sapiens
  misc_feature (4)..(5): n is a, c, g, or t
  misc_feature (7)..(18): n is a, c, g, or t
  misc_feature (20)..(20): n is a, c, g, or t
  misc_feature (22)..(22): n is a, c, g, or t
  misc_feature (26)..(27): n is a, c, g, or t
  misc_feature (37)..(37): n is a, c, g, or t
  misc_feature (39)..(39): n is a, c, g, or t
  misc_feature (41)..(41): n is a, c, g, or t
  misc_feature (44)..(47): n is a, c, g, or t
  misc_feature (56)..(56): n is a, c, g, or t
  misc_feature (60)..(60): n is a, c, g, or t
  misc_feature (65)..(65): n is a, c, g, or t
  misc_feature (68)..(68): n is a, c, g, or t
  misc_feature (72)..(72): n is a, c, g, or t
  misc_feature (77)..(77): n is a, c, g, or t
  misc_feature (86)..(86): n is a, c, g, or t
  misc_feature (89)..(89): n is a, c, g, or t
  misc_feature (95)..(97): n is a, c, g, or t
  misc_feature (99)..(100): n is a, c, g, or t
  misc_feature (102)..(102): n is a, c, g, or t
  misc_feature (104)..(105): n is a, c, g, or t
  misc_feature (107)..(110): n is a, c, g, or t
  misc_feature (114)..(114): n is a, c, g, or t
  misc_feature (117)..(117): n is a, c, g, or t
  misc_feature (120)..(120): n is a, c, g, or t
  misc_feature (122)..(123): n is a, c, g, or t
  misc_feature (126)..(126): n is a, c, g, or t
  misc_feature (130)..(130): n is a, c, g, or t
  misc_feature (143)..(144): n is a, c, g, or t
  misc_feature (148)..(148): n is a, c, g, or t
  misc_feature (150)..(151): n is a, c, g, or t
  misc_feature (154)..(156): n is a, c, g, or t
  misc_feature (166)..(166): n is a, c, g, or t
  misc_feature (168)..(168): n is a, c, g, or t
  misc_feature (172)..(174): n is a, c, g, or t
  misc_feature (178)..(178): n is a, c, g, or t
  misc_feature (180)..(182): n is a, c, g, or t
  misc_feature (192)..(192): n is a, c, g, or t
  misc_feature (195)..(195): n is a, c, g, or t
  misc_feature (197)..(197): n is a, c, g, or t
  misc_feature (201)..(202): n is a, c, g, or t
  misc_feature (204)..(204): n is a, c, g, or t
  misc_feature (207)..(207): n is a, c, g, or t
  misc_feature (214)..(214): n is a, c, g, or t
  misc_feature (218)..(218): n is a, c, g, or t
  misc_feature (220)..(220): n is a, c, g, or t
  misc_feature (227)..(230): n is a, c, g, or t
  misc_feature (233)..(233): n is a, c, g, or t
  misc_feature (237)..(238): n is a, c, g, or t
  misc_feature (241)..(241): n is a, c, g, or t
  misc_feature (246)..(247): n is a, c, g, or t
  misc_feature (249)..(249): n is a, c, g, or t
  misc_feature (252)..(252): n is a, c, g, or t
  misc_feature (256)..(256): n is a, c, g, or t
attnnannnnnnnnnnnntnanatannattattccgnantnccnnnngaggggganttanctatnagnaggncgccntcaccatcnccntcactnnntnntnanntnnnnggcnaanaanannaanattntaaccacccccgnncggncnngcnnnattgtagatngntaannnctgngnnngtataagaantcngntaanncngtntttccangtangngagttgnnnntgngttnntcnatagnntnggncttn

SEQ ID NO: 264 - DNA, 1098 bp, Homo Sapiens
  misc_feature (1)..(2): n is a, c, g, or t
  misc_feature (4)..(4): n is a, c, g, or t
  misc_feature (797)..(797): n is a, c, g, or t
  misc_feature (805)..(805): n is a, c, g, or t
  misc_feature (808)..(808): n is a, c, g, or t
  misc_feature (827)..(827): n is a, c, g, or t
  misc_feature (840)..(840): n is a, c, g, or t
  misc_feature (847)..(847): n is a, c, g, or t
  misc_feature (861)..(861): n is a, c, g, or t
  misc_feature (869)..(869): n is a, c, g, or t
  misc_feature (871)..(871): n is a, c, g, or t
  misc_feature (873)..(873): n is a, c, g, or t
  misc_feature (876)..(876): n is a, c, g, or t
  misc_feature (881)..(881): n is a, c, g, or t
  misc_feature (886)..(886): n is a, c, g, or t
  misc_feature (891)..(891): n is a, c, g, or t
  misc_feature (898)..(898): n is a, c, g, or t
  misc_feature (914)..(915): n is a, c, g, or t
  misc_feature (919)..(919): n is a, c, g, or t
  misc_feature (929)..(929): n is a, c, g, or t
  misc_feature (934)..(934): n is a, c, g, or t
  misc_feature (943)..(943): n is a, c, g, or t
  misc_feature (945)..(945): n is a, c, g, or t
  misc_feature (950)..(951): n is a, c, g, or t
  misc_feature (956)..(956): n is a, c, g, or t
  misc_feature (962)..(962): n is a, c, g, or t
  misc_feature (969)..(970): n is a, c, g, or t
  misc_feature (979)..(979): n is a, c, g, or t
  misc_feature (982)..(982): n is a, c, g, or t
  misc_feature (985)..(985): n is a, c, g, or t
  misc_feature (995)..(997): n is a, c, g, or t
  misc_feature (1005)..(1005): n is a, c, g, or t
  misc_feature (1010)..(1010): n is a, c, g, or t
  misc_feature (1012)..(1012): n is a, c, g, or t
  misc_feature (1016)..(1016): n is a, c, g, or t
  misc_feature (1034)..(1034): n is a, c, g, or t
  misc_feature (1037)..(1037): n is a, c, g, or t
  misc_feature (1051)..(1057): n is a, c, g, or t
  misc_feature (1060)..(1060): n is a, c, g, or t
  misc_feature (1062)..(1095): n is a, c, g, or t
  misc_feature (1097)..(1098): n is a, c, g, or t
nnantgagaaattactatgagaggatcgcatcaccatcaccatcacggatcctatttaggtgacactatagaatcgtcgacccacgcgtccgccggagcccttgagcgcgaggcgcggagcccccggagcccccaaaccgcagacacatccccgcgccccagagccccggcctgcgcgcccagccgggcccgcgcgatgccctcagaccggcctttcaagcagcggcggagcttcgccgaccgctgtaaggaggtacagcagatccgcgaccagcaccccagcaaaatcccggtgatcatcgagcgctacaagggtgagaagcagctgcccgtcctggacaagaccaagtttttggtcccggaccatgtcaacatgagcgagttggtcaagatcatccggcgccgcctgcagctgaaccccacgcaggccttcttcctgctggtgaaccagcacagcatggtgagtgtgtccacgcccatcgcggacatctacgagcaggagaaagacgaggacggcttcctctatatggtctacgcctcccaggaaaccttcggcttctgagccagcagtaggggggctcggcctgggagtcggggggccccggtcaggccctgcccagagagctcctggttcctgaactgagctgcctctaccgtggtgggctgggcaggcatgtgcccccctagtcagagggcaccaacccacctactctgcccctgggtggatcctgggccggtcgtgttagggttgtccctctggggtgctggctggtgggatgggggagggtggggagcancttcccancanccctgctgtgtggttcatntttttttttaagncccctgnctgtctgcccaatntgcccccntnanccnacccnaaggntttgncaaccgncttggaatctggcccnncccntgaaaaaaantgggncccttgggntnccccnnccccnttgggnttttccnngtggggggnaanggnatttgggggnnnattttgtnccctntngganaaaaaaaaaaaaatttgnttnaggcctttcttggnnnnnnnaanannnnnnnnnnnnnnnnnnnnnnnnnnnnnnnnnnann

SEQ ID NO: 265 - DNA, 1197 bp, Homo Sapiens
  misc_feature (1)..(1): n is a, c, g, or t
  misc_feature (907)..(907): n is a, c, g, or t
  misc_feature (909)..(909): n is a, c, g, or t
  misc_feature (954)..(954): n is a, c, g, or t
  misc_feature (958)..(958): n is a, c, g, or t
  misc_feature (969)..(969): n is a, c, g, or t
  misc_feature (972)..(972): n is a, c, g, or t
  misc_feature (1015)..(1015): n is a, c, g, or t
  misc_feature (1019)..(1019): n is a, c, g, or t
  misc_feature (1046)..(1046): n is a, c, g, or t
  misc_feature (1052)..(1052): n is a, c, g, or t
  misc_feature (1055)..(1055): n is a, c, g, or t
  misc_feature (1070)..(1070): n is a, c, g, or t
  misc_feature (1079)..(1079): n is a, c, g, or t
  misc_feature (1081)..(1081): n is a, c, g, or t
  misc_feature (1085)..(1086): n is a, c, g, or t
  misc_feature (1092)..(1092): n is a, c, g, or t
  misc_feature (1094)..(1094): n is a, c, g, or t
  misc_feature (1107)..(1107): n is a, c, g, or t
  misc_feature (1112)..(1112): n is a, c, g, or t
  misc_feature (1115)..(1115): n is a, c, g, or t
  misc_feature (1121)..(1121): n is a, c, g, or t
  misc_feature (1126)..(1126): n is a, c, g, or t
  misc_feature (1134)..(1134): n is a, c, g, or t
  misc_feature (1136)..(1136): n is a, c, g, or t
  misc_feature (1139)..(1139): n is a, c, g, or t
  misc_feature (1145)..(1145): n is a, c, g, or t
  misc_feature (1148)..(1148): n is a, c, g, or t
  misc_feature (1154)..(1154): n is a, c, g, or t
  misc_feature (1158)..(1159): n is a, c, g, or t
  misc_feature (1161)..(1161): n is a, c, g, or t
  misc_feature (1165)..(1165): n is a, c, g, or t
  misc_feature (1171)..(1171): n is a, c, g, or t
  misc_feature (1174)..(1174): n is a, c, g, or t
  misc_feature (1183)..(1183): n is a, c, g, or t
  misc_feature (1185)..(1185): n is a, c, g, or t
  misc_feature (1197)..(1197): n is a, c, g, or t
naatagagaaattactatgagaggatcgcatcaccatcaccatcacggatcctatttaggtgacactatagaatcgtcgacccacgcgtccgctcaagctgaagaagatcttagtgagcaagaacaaaatcagcttaatgtcctcaaaaagcatggttatgtcgtaggaagagttggaaggacattcttgtattcagaagaacagaaggataacattccctttgagtttgatgctgattcacttgcctttgacatggaaaatgaccctgttatgggtacacacaaatccaccaaacaagtagaattgactgcacaagatgtgaaagatgcccactggttttatgacacccctggaattacaaaagaaaattgtattttaaatcttctaacagaaaaagaagtaaatattgttttgccaacacagtccattgttccaagaacttttgtgcttaaaccaggaatggttctgtttttgggtgctataggccgcatagatttcctgcagggaaatcagtcagcttggtttacagtcgtggcttccaacatcctccctgtgcatatcacctccttggacagggcagacgctctgtatcagaagcatgcaggtcatacgttactccagattccaatgggtggaaaagaacgaatggcaggatttcctcctcttgttgctgaagacattatgttaaaagaaggactgggggcatctgaagcagtggccgacatcaagttttcctctgcaggttgggtttcagtaacacctaattttaaggacagactgcatctccgaggctatacacctgaaggaacagttttgaccgtccggccccctctcttgccatatattgttaacatcaaaggacagcgcatcaagaaaagtgtggcctataaaaccaagaagcctccntncccttatgtacaacgtgaggaagaagaaagggaaagataatggtntganaccgaccttgntcnctccaaatattacctgtatggaacccaacaaaatacattgaanttgnattaaacatataacgcaaaataagccncccatnctnaaaaaaaaaaaaaangggcggccncncccnnaagggngncgaataagctaantaccngancctggnccccnggtgaaananccngaaggnccncaaacncccnngnattnttcaanccnccggtgccncnggggtttttttn

SEQ ID NO: 266 - DNA, 256 bp, Homo Sapiens
agagtctctttgctgccctccggggccgtggggccagggccgggccgggcgagcagggcctgctgaacgcctaccgccaggtgcaggaggtcagcagcgacggcgggtgcgaggccgccctgggcacccactaccgcgcctatctcctcaagtgccacgagctgccgttttatgggtgtgccttcttccacggtgaggttgacaagccggcccaaggctttttgcaccggggtgggcgcaagccagtttctgtggc

SEQ ID NO: 267 - DNA, 1403 bp, Homo Sapiens
  misc_feature (786)..(786): n is a, c, g, or t
  misc_feature (813)..(813): n is a, c, g, or t
  misc_feature (841)..(841): n is a, c, g, or t
  misc_feature (857)..(857): n is a, c, g, or t
  misc_feature (898)..(898): n is a, c, g, or t
  misc_feature (906)..(907): n is a, c, g, or t
  misc_feature (925)..(925): n is a, c, g, or t
  misc_feature (941)..(941): n is a, c, g, or t
  misc_feature (943)..(943): n is a, c, g, or t
  misc_feature (949)..(950): n is a, c, g, or t
  misc_feature (956)..(956): n is a, c, g, or t
  misc_feature (966)..(968): n is a, c, g, or t
  misc_feature (986)..(986): n is a, c, g, or t
  misc_feature (1001)..(1001): n is a, c, g, or t
  misc_feature (1003)..(1003): n is a, c, g, or t
  misc_feature (1005)..(1006): n is a, c, g, or t
  misc_feature (1009)..(1009): n is a, c, g, or t
  misc_feature (1011)..(1013): n is a, c, g, or t
  misc_feature (1015)..(1015): n is a, c, g, or t
  misc_feature (1018)..(1018): n is a, c, g, or t
  misc_feature (1025)..(1025): n is a, c, g, or t
  misc_feature (1027)..(1027): n is a, c, g, or t
  misc_feature (1041)..(1041): n is a, c, g, or t
  misc_feature (1045)..(1046): n is a, c, g, or t
  misc_feature (1058)..(1058): n is a, c, g, or t
  misc_feature (1066)..(1066): n is a, c, g, or t
  misc_feature (1074)..(1074): n is a, c, g, or t
  misc_feature (1078)..(1078): n is a, c, g, or t
  misc_feature (1082)..(1082): n is a, c, g, or t
  misc_feature (1094)..(1095): n is a, c, g, or t
  misc_feature (1100)..(1100): n is a, c, g, or t
  misc_feature (1120)..(1120): n is a, c, g, or t
  misc_feature (1129)..(1129): n is a, c, g, or t
  misc_feature (1144)..(1144): n is a, c, g, or t
  misc_feature (1147)..(1147): n is a, c, g, or t
  misc_feature (1167)..(1168): n is a, c, g, or t
  misc_feature (1171)..(1172): n is a, c, g, or t
  misc_feature (1174)..(1176): n is a, c, g, or t
  misc_feature (1186)..(1187): n is a, c, g, or t
  misc_feature (1192)..(1192): n is a, c, g, or t
  misc_feature (1195)..(1195): n is a, c, g, or t
  misc_feature (1197)..(1197): n is a, c, g, or t
  misc_feature (1199)..(1199): n is a, c, g, or t
  misc_feature (1205)..(1205): n is a, c, g, or t
  misc_feature (1210)..(1210): n is a, c, g, or t
  misc_feature (1217)..(1217): n is a, c, g, or t
  misc_feature (1228)..(1228): n is a, c, g, or t
  misc_feature (1243)..(1244): n is a, c, g, or t
  misc_feature (1258)..(1258): n is a, c, g, or t
  misc_feature (1264)..(1264): n is a, c, g, or t
  misc_feature (1273)..(1273): n is a, c, g, or t
  misc_feature (1276)..(1276): n is a, c, g, or t
  misc_feature (1297)..(1297): n is a, c, g, or t
  misc_feature (1308)..(1308): n is a, c, g, or t
  misc_feature (1312)..(1313): n is a, c, g, or t
  misc_feature (1316)..(1316): n is a, c, g, or t
  misc_feature (1318)..(1318): n is a, c, g, or t
  misc_feature (1325)..(1325): n is a, c, g, or t
  misc_feature (1332)..(1332): n is a, c, g, or t
  misc_feature (1336)..(1337): n is a, c, g, or t
  misc_feature (1340)..(1341): n is a, c, g, or t
  misc_feature (1348)..(1348): n is a, c, g, or t
  misc_feature (1351)..(1351): n is a, c, g, or t
  misc_feature (1362)..(1362): n is a, c, g, or t
  misc_feature (1375)..(1376): n is a, c, g, or t
  misc_feature (1382)..(1382): n is a, c, g, or t
  misc_feature (1385)..(1385): n is a, c, g, or t
  misc_feature (1388)..(1388): n is a, c, g, or t
  misc_feature (1393)..(1393): n is a, c, g, or t
  misc_feature (1397)..(1397): n is a, c, g, or t
  misc_feature (1399)..(1399): n is a, c, g, or t
cgattagagagaattactatgagaggatcgcatcaccatcaccatcacggatcctatttaggtgacactatagaatcgtcgacccacgcgtccgcggacgcgtgggggcaaaaagcaaaagaagtgcagaagaagctggtgcataatgctctggcaaatttggatggtcatccagaggataagccaacgcacatcatcttcggttctgacagtgaatgtgaaacagaggagacatcgactcaggagcagagccatccaggagaggaatgggtgaaagagtctatgggtaaaacatcagggaagctgtttgatagcagtgatgatgacgaatctgattctgaagatgacagtaataggttcaaaattaaacctcagtttgagggcagagctggacagaagctcatggatttacagtcgcactttggcaccgatgacagattccgcatggactctcgatttctagaaactgacagtgaagaggaacaggaagaggtaaatgaaaagaaaactgctgaggaagaagagcttgctgaagaaaaaaagaaagccctgaatgttgtacaaagtgttttgcaaatcaacttaagcaattctacaaacagaggatcagtagctgctaagaaatttaaggacatcatacattatgatccaacgaagcaagaccatgccacttacgaaagaaaaagagatgataagccaaaagaaagtaaagcaaaaaaaaaaaaaaagggcggccgctccctatagtgagtcgtattaagcttaattagctgagcttggactccntgttgatagatcccgtaatgacctcanaactccatctggatttgtttcaaaaacnctcggttgcccccggncgttttttattggtgagaatccaagcctagccttggccganaattttcnnggagcctaaggaagcttnaaatggaaaaaaaatncnctgganntacccnccggttgatnnnttcccaatggccatccgnaaagaacatttttgngncnnttncnnncnttncctccangntacctttaacccanaacnnttccccctgganattaacgncccttttnaaanaccntaaaaaaaaaannaaccncaatttttttccggcctttnttcccattnctgccccccccgatnaangccccccccggaaattcccnnggnncnnnaaaaaagggnnacccnggngnantggganaaagntcccccnttttacccccnttttcctggaacaanntaaccttttccccncctggngggacaccnccnaatttccgggatttccccctntttcccaaaantggnnggntncgggaancctcccnctannccnnagggttnttnaaaatgttttntcccccccccccnngggggnatnccnctttntttnanggcc

SEQ ID NO: 268 - DNA, 256 bp, Homo Sapiens
tgagccgccggcgcgcttcgctgcctggcggcctttccccgagccgagcccgcttcccgaggccgccagtcgtcgcctgcccgcgcctgcgcagcgtcccgggccgagagggccacggcggcggccatggcgcaccgctgtttgcggctgtggggccggggcggctgctggccccgcggcctacagcagctcctcgtgcctggcggcgtgggcccgggcgagcagccctgcctccggacgctttaccgatttgtta

SEQ ID NO: 269 - DNA, 1387 bp, Homo Sapiens
  misc_feature (2)..(4): n is a, c, g, or t
  misc_feature (7)..(15): n is a, c, g, or t
  misc_feature (17)..(17): n is a, c, g, or t
  misc_feature (19)..(23): n is a, c, g, or t
  misc_feature (767)..(767): n is a, c, g, or t
  misc_feature (779)..(780): n is a, c, g, or t
  misc_feature (782)..(782): n is a, c, g, or t
  misc_feature (793)..(793): n is a, c, g, or t
  misc_feature (800)..(800): n is a, c, g, or t
  misc_feature (815)..(815): n is a, c, g, or t
  misc_feature (820)..(821): n is a, c, g, or t
  misc_feature (829)..(829): n is a, c, g, or t
  misc_feature (838)..(838): n is a, c, g, or t
  misc_feature (847)..(847): n is a, c, g, or t
  misc_feature (851)..(851): n is a, c, g, or t
  misc_feature (855)..(855): n is a, c, g, or t
  misc_feature (864)..(864): n is a, c, g, or t
  misc_feature (868)..(868): n is a, c, g, or t
  misc_feature (876)..(877): n is a, c, g, or t
  misc_feature (880)..(880): n is a, c, g, or t
  misc_feature (889)..(889): n is a, c, g, or t
  misc_feature (892)..(892): n is a, c, g, or t
  misc_feature (895)..(896): n is a, c, g, or t
  misc_feature (898)..(898): n is a, c, g, or t
  misc_feature (902)..(903): n is a, c, g, or t
  misc_feature (906)..(908): n is a, c, g, or t
  misc_feature (911)..(911): n is a, c, g, or t
  misc_feature (913)..(914): n is a, c, g, or t
  misc_feature (918)..(918): n is a, c, g, or t
  misc_feature (923)..(923): n is a, c, g, or t
  misc_feature (932)..(932): n is a, c, g, or t
  misc_feature (936)..(936): n is a, c, g, or t
  misc_feature (943)..(943): n is a, c, g, or t
  misc_feature (948)..(948): n is a, c, g, or t
  misc_feature (953)..(954): n is a, c, g, or t
  misc_feature (956)..(958): n is a, c, g, or t
  misc_feature (960)..(960): n is a, c, g, or t
  misc_feature (963)..(963): n is a, c, g, or t
  misc_feature (970)..(970): n is a, c, g, or t
  misc_feature (972)..(974): n is a, c, g, or t
  misc_feature (979)..(984): n is a, c, g, or t
  misc_feature (989)..(989): n is a, c, g, or t
  misc_feature (993)..(993): n is a, c, g, or t
  misc_feature (996)..(997): n is a, c, g, or t
  misc_feature (1000)..(1002): n is a, c, g, or t
  misc_feature (1004)..(1004): n is a, c, g, or t
  misc_feature (1007)..(1008): n is a, c, g, or t
  misc_feature (1010)..(1016): n is a, c, g, or t
  misc_feature (1019)..(1019): n is a, c, g, or t
  misc_feature (1024)..(1024): n is a, c, g, or t
  misc_feature (1028)..(1029): n is a, c, g, or t
  misc_feature (1033)..(1037): n is a, c, g, or t
  misc_feature (1042)..(1045): n is a, c, g, or t
  misc_feature (1047)..(1048): n is a, c, g, or t
  misc_feature (1050)..(1051): n is a, c, g, or t
  misc_feature (1053)..(1056): n is a, c, g, or t
  misc_feature (1061)..(1065): n is a, c, g, or t
  misc_feature (1069)..(1069): n is a, c, g, or t
  misc_feature (1071)..(1073): n is a, c, g, or t
  misc_feature (1076)..(1080): n is a, c, g, or t
  misc_feature (1082)..(1084): n is a, c, g, or t
  misc_feature (1086)..(1087): n is a, c, g, or t
  misc_feature (1089)..(1089): n is a, c, g, or t
  misc_feature (1092)..(1092): n is a, c, g, or t
  misc_feature (1095)..(1095): n is a, c, g, or t
  misc_feature (1098)..(1098): n is a, c, g, or t
  misc_feature (1101)..(1102): n is a, c, g, or t
  misc_feature (1104)..(1107): n is a, c, g, or t
  misc_feature (1109)..(1109): n is a, c, g, or t
  misc_feature (1112)..(1113): n is a, c, g, or t
  misc_feature (1115)..(1118): n is a, c, g, or t
  misc_feature (1120)..(1126): n is a, c, g, or t
  misc_feature (1128)..(1139): n is a, c, g, or t
  misc_feature (1142)..(1144): n is a, c, g, or t
  misc_feature (1146)..(1148): n is a, c, g, or t
  misc_feature (1152)..(1155): n is a, c, g, or t
  misc_feature (1158)..(1164): n is a, c, g, or t
  misc_feature (1167)..(1167): n is a, c, g, or t
  misc_feature (1169)..(1169): n is a, c, g, or t
  misc_feature (1172)..(1173): n is a, c, g, or t
  misc_feature (1175)..(1187): n is a, c, g, or t
  misc_feature (1189)..(1192): n is a, c, g, or t
  misc_feature (1194)..(1194): n is a, c, g, or t
  misc_feature (1198)..(1203): n is a, c, g, or t
  misc_feature (1205)..(1205): n is a, c, g, or t
  misc_feature (1207)..(1215): n is a, c, g, or t
  misc_feature (1217)..(1235): n is a, c, g, or t
  misc_feature (1237)..(1243): n is a, c, g, or t
  misc_feature (1246)..(1249): n is a, c, g, or t
  misc_feature (1251)..(1258): n is a, c, g, or t
  misc_feature (1260)..(1261): n is a, c, g, or t
  misc_feature (1263)..(1266): n is a, c, g, or t
  misc_feature (1269)..(1270): n is a, c, g, or t
  misc_feature (1272)..(1280): n is a, c, g, or t
  misc_feature (1284)..(1287): n is a, c, g, or t
  misc_feature (1289)..(1291): n is a, c, g, or t
  misc_feature (1293)..(1302): n is a, c, g, or t
  misc_feature (1304)..(1305): n is a, c, g, or t
  misc_feature (1307)..(1312): n is a, c, g, or t
  misc_feature (1314)..(1332): n is a, c, g, or t
  misc_feature (1334)..(1352): n is a, c, g, or t
  misc_feature (1354)..(1360): n is a, c, g, or t
  misc_feature (1362)..(1363): n is a, c, g, or t
  misc_feature (1365)..(1367): n is a, c, g, or t
  misc_feature (1369)..(1371): n is a, c, g, or t
  misc_feature (1373)..(1378): n is a, c, g, or t
  misc_feature (1380)..(1386): n is a, c, g, or t
annnaannnnnnnnncntnnnnntcccatcacggatcctatttaggtgacactatagaatcgtcgacccacgcgtccggctctcagctggctcttgtctcgcccttttgttttatttcggaggcttgcagtttagggcatcgaggagccacagccggagagaagaacacagcggtaggaatggcttgcaccaccccagtccggatcatttctggccccgcttcccggacgctctgcgccccttcgttccttgggatcaattggaaaacgaggattccagcgtgcacatttccccccggcagaagcgagatgccaactccagcatctacaaaggcaagaagtgccgcatggagtcctgcttcgatttcaccctttgcaagaaaaacggcttcaaagtctacgtatacccacagcaaaaaggggagaaaatcgccgaaagttaccaaaacattctagcggccatcgagggctccaggttctacacctcggaccccagccaggcgtgcctctttgtcctgagtctggatactttagacagagaccagttgtcacctcagtatgtgcacaatttgagatccaaagtgcagagtctccacttgtggaacaatggtaggaatcatttaatttttaatttatattccggcacttggcctgactacaccgaggacgtggggtttgacatcggccaggcgatgctggccaaagccagcatcagtactgaaaaacttccgacccaactttgatgtttctattcccctcttttctaangatcatccccannanaggaagggganagggggntttttgaagttcaanaccannccttcctntcaggaaanaacatgctnggtnttcnaggggaaanaagntacttgannggnaaaggatcnaanccnngnatgnnttnnnttncnntccnttaanggggaagangttntgctccnccccncctgnnannnanggnaaaaatngnnnaaaannnnnngattncttnctnngannnanaannannnnnnnttntaaantatnntttnnnnnaaatnnnnannanngnnnnttttnnnnngttncnnnggnnnnnannntnngnctntanaantcnngnnnntnttnngnnnncnnnnnnncnnnnnnnnnnnnaannngnnnaatnnnnttnnnnnnnatnanttnnannnnnnnnnnnnnannnnanaaannnnnnanannnnnnnnntnnnnnnnnnnnnnnnnnnnannnnnnntannnnannnnnnnngnngnnnnttnntnnnnnnnnntatnnnnannntnnnnnnnnnnanntnnnnnntnnnnnnnnnnnnnnnnnnnannnnnnnnnnnnnnnnnnntnnnnnnnanntnnntnnnannnnnnannnnnnna

SEQ ID NO: 270 - DNA, 256 bp, Homo Sapiens
cgctgtacgccgtgatcgagaaagccaagaaggctcgctccaccaagaagaagtccaagaaggcggactgccccattgcctgggccaacctcatgctgtttgactacaaggaccagcttaagaccggggaacgctgcctctacatgtggccctccgtcccagatgagaagggcgagctgctgaaccccacgggcactgtgcgcagtaaccccaacacggatagcgccgctgccctgctcatctgcctgcccgaggt

SEQ ID NO: 271 - DNA, 256 bp, Homo Sapiens
  misc_feature (29)..(29): n is a, c, g, or t
  misc_feature (32)..(33): n is a, c, g, or t
  misc_feature (37)..(37): n is a, c, g, or t
  misc_feature (42)..(42): n is a, c, g, or t
  misc_feature (62)..(62): n is a, c, g, or t
  misc_feature (72)..(72): n is a, c, g, or t
taaaaattatttgctttgtgagcggatanatnntatngattnattgtgagcggatacatttncacagaattnttaaagaggagaaattaactatgagaggatcgcatcaccatcaccatcacggatcctatttaggtgacactatagaatcgtcgacccacgcgtccggaaaagctgggaaccttggtggaggggtggtgaccatcgaaaggagcaagagcaagatcaccgtgacatccgaggtgcctttctccaa

SEQ ID NO: 272 - DNA, 256 bp, Homo Sapiens
  misc_feature (4)..(4): n is a, c, g, or t
  misc_feature (130)..(130): n is a, c, g, or t
  misc_feature (224)..(224): n is a, c, g, or t
taanaggagaattaactatgagaggatcgcatcaccatcaccatcacggatcctatttaggtgacactatagaatcgtcgacccacgcgtccgggacccgggacgacgagtacgactacctattcaaagnggtgctcatcggggactcaggcgtgggcaagagcaacctgctgtcgcgcttcacccgcaacgagttcaacctggagagcaagagcaccatcggngtggagttcgccacccgcagcatccaggtgga

SEQ ID NO: 273 - DNA, 1200 bp, Homo Sapiens
  misc_feature (788)..(788): n is a, c, g, or t
  misc_feature (800)..(800): n is a, c, g, or t
  misc_feature (826)..(826): n is a, c, g, or t
  misc_feature (832)..(832): n is a, c, g, or t
  misc_feature (842)..(842): n is a, c, g, or t
  misc_feature (870)..(870): n is a, c, g, or t
  misc_feature (882)..(882): n is a, c, g, or t
  misc_feature (890)..(890): n is a, c, g, or t
  misc_feature (902)..(902): n is a, c, g, or t
  misc_feature (919)..(919): n is a, c, g, or t
  misc_feature (936)..(936): n is a, c, g, or t
  misc_feature (938)..(938): n is a, c, g, or t
  misc_feature (944)..(944): n is a, c, g, or t
  misc_feature (950)..(950): n is a, c, g, or t
  misc_feature (955)..(955): n is a, c, g, or t
  misc_feature (966)..(967): n is a, c, g, or t
  misc_feature (975)..(975): n is a, c, g, or t
  misc_feature (981)..(982): n is a, c, g, or t
  misc_feature (986)..(986): n is a, c, g, or t
  misc_feature (990)..(990): n is a, c, g, or t
  misc_feature (993)..(993): n is a, c, g, or t
  misc_feature (1000)..(1000): n is a, c, g, or t
  misc_feature (1004)..(1005): n is a, c, g, or t
  misc_feature (1010)..(1010): n is a, c, g, or t
  misc_feature (1012)..(1012): n is a, c, g, or t
  misc_feature (1023)..(1023): n is a, c, g, or t
  misc_feature (1033)..(1033): n is a, c, g, or t
  misc_feature (1035)..(1036): n is a, c, g, or t
  misc_feature (1038)..(1040): n is a, c, g, or t
  misc_feature (1044)..(1045): n is a, c, g, or t
  misc_feature (1049)..(1050): n is a, c, g, or t
  misc_feature (1057)..(1058): n is a, c, g, or t
  misc_feature (1062)..(1063): n is a, c, g, or t
  misc_feature (1065)..(1065): n is a, c, g, or t
  misc_feature (1067)..(1069): n is a, c, g, or t
  misc_feature (1071)..(1071): n is a, c, g, or t
  misc_feature (1077)..(1077): n is a, c, g, or t
  misc_feature (1083)..(1087): n is a, c, g, or t
  misc_feature (1090)..(1092): n is a, c, g, or t
  misc_feature (1096)..(1096): n is a, c, g, or t
  misc_feature (1099)..(1099): n is a, c, g, or t
  misc_feature (1101)..(1101): n is a, c, g, or t
  misc_feature (1104)..(1104): n is a, c, g, or t
  misc_feature (1106)..(1107): n is a, c, g, or t
  misc_feature (1114)..(1116): n is a, c, g, or t
  misc_feature (1118)..(1118): n is a, c, g, or t
  misc_feature (1123)..(1127): n is a, c, g, or t
  misc_feature (1130)..(1135): n is a, c, g, or t
  misc_feature (1138)..(1141): n is a, c, g, or t
  misc_feature (1144)..(1146): n is a, c, g, or t
  misc_feature (1150)..(1151): n is a, c, g, or t
  misc_feature (1156)..(1159): n is a, c, g, or t
  misc_feature (1162)..(1163): n is a, c, g, or t
  misc_feature (1166)..(1168): n is a, c, g, or t
  misc_feature (1170)..(1175): n is a, c, g, or t
  misc_feature (1177)..(1181): n is a, c, g, or t
  misc_feature (1183)..(1184): n is a, c, g, or t
  misc_feature (1186)..(1188): n is a, c, g, or t
  misc_feature (1190)..(1193): n is a, c, g, or t
  misc_feature (1195)..(1195): n is a, c, g, or t
  misc_feature (1197)..(1198): n is a, c, g, or t
aatagagagattactatgagaggatcgcatcaccatcaccatcacggatcctatttaggtgacactatagaatcgtcgacccacgcgtccgatcaaccgcaagaagcgcatcccggacacccgcgtccactgctgcctctacttcatccccgccaccggccactccctcaggcccctggacatcgagtttatgaaacgcctgagcaaggtggtcaacatcgtccctgtcatcgccaaggcggacacactcaccctggaggagagggtccacttcaaacagcggatcaccgcagacctgctgtccaacggcatcgacgtgtacccccagaaggaatttgatgaggactcggaggaccggctggtgaacgagaagttccgggagatgatcccatttgctgtggtgggcagtgaccacgagtaccaggtcaacggcaagaggatccttgggaggaagaccaagtggggtaccatcgaagttgaaaacaccacacactgtgagtttgcctacctgcgggaccttctcatcaggacgcacatgcagaacatcaaggacatcaccagcagcatccacttcgaggcgtaccgtgtgaagcgcctcaacgagggcagcagcgccatggccaacggcgtggaggagaaggagccagaagccccggagatgtagacgccgccctgcccacccccgggatcctgcccccaagtcatttccgtcccccccccaggccctcccaccaccccattttattttatatgattttctccatttgtcatcgttccccaccccttcnacatgctgccangaaacaagggaaggggcctccctccnagtgantcatgatgangccgcggcctccccgaggttgtggggangctgcactgganccacaggnaggggtgaaaancacccactgaattgacntgaccctctgtccccangncctggntccccnagggntcaaaaaacannttcggtgngcaatnntccntccntgnggggttntcanngccgnangcctttggggngggggccagncnncnnntttnnaaannaacccanngggnntnannntnccttcntcccannnnnccnnncccntgnantgntnnaaaaccnnngnaaaannnnnccnnnnnnaannnntgnnncccnnccccnnnnggnnggnnntnnnnnncnnnnncnngnnngnnnnangnnaa

SEQ ID NO: 274 - DNA, 1173 bp, Homo Sapiens
  misc_feature (855)..(855): n is a, c, g, or t
  misc_feature (867)..(867): n is a, c, g, or t
  misc_feature (938)..(938): n is a, c, g, or t
  misc_feature (967)..(967): n is a, c, g, or t
  misc_feature (972)..(972): n is a, c, g, or t
  misc_feature (986)..(986): n is a, c, g, or t
  misc_feature (988)..(988): n is a, c, g, or t
  misc_feature (1014)..(1014): n is a, c, g, or t
  misc_feature (1020)..(1020): n is a, c, g, or t
  misc_feature (1025)..(1025): n is a, c, g, or t
  misc_feature (1033)..(1033): n is a, c, g, or t
  misc_feature (1039)..(1039): n is a, c, g, or t
  misc_feature (1053)..(1053): n is a, c, g, or t
  misc_feature (1058)..(1058): n is a, c, g, or t
  misc_feature (1060)..(1060): n is a, c, g, or t
  misc_feature (1065)..(1065): n is a, c, g, or t
  misc_feature (1085)..(1085): n is a, c, g, or t
  misc_feature (1092)..(1092): n is a, c, g, or t
  misc_feature (1106)..(1106): n is a, c, g, or t
  misc_feature (1112)..(1112): n is a, c, g, or t
  misc_feature (1115)..(1116): n is a, c, g, or t
  misc_feature (1119)..(1119): n is a, c, g, or t
  misc_feature (1127)..(1127): n is a, c, g, or t
  misc_feature (1139)..(1139): n is a, c, g, or t
  misc_feature (1146)..(1147): n is a, c, g, or t
  misc_feature (1154)..(1156): n is a, c, g, or t
  misc_feature (1158)..(1158): n is a, c, g, or t
  misc_feature (1166)..(1166): n is a, c, g, or t
tagagaaattactatgagaggatcgcatcaccatcaccatcacggatcctatttaggtgacactatagaatcgtcgacccacgcgtccgagacagggatggagctgaagactatcaacgactttctcttccagagccagatcgacaacatcaacctgttcaaggtgcagcgatactgtgagaagagcatgatcagcagaaagctctttggcttcactgaacggtacggagcagtgttctcatcccgggagcagcccaaactggctgggtttcagcaattcctgcagagcctgcagcccaggacgactgaagcacttgcagcccctgcagacgagagtcaggccagcgtcccgcaaccagcttccccactgatgcacatcgaaggcttcctggcagctctcactacggccaaccaggacggcagggtcatcctgagccgccaaggcagtctcagtcagagcaccctgaagtttttgctcctgaatccagctgtgcactttgcccaagtggtgaaggaatgccgggcagtggtcattgccggggggaccatgcagccggctgcaggagcagtggagactcctctgctgctccattctgtagccccaggatcacatgtctcccagagaaagctgttctgtggtttcaaactcaaggaaaaaaatcatgattccacttttaaaaggtgtctgacttccggcagcagctgctggcctgtgccggggtggaagctgagcgcgtggtggagttttcctgtggtcacgtgatccctccagacaacatcctgccccttgtcatctgcatcggggtctccaaccagccgctagaattcacgttccagaaaagagacctgcctcanatgatggacgangtgggtcgcatcctctgtaacctgtgcagtgtggtttctggaaggggtggtctgtttcttcccctcctacnagtacctgcgccaggtccatgcccctggnaaaanggtggcctgctggncnatctggctgccagaaaaaaattttcnggaacntaaancgcccccnggtaancaggggctgctggngtatncnagggnatcagggggggcgtctgctnacttggnctgggccagaaaangccccngannggncctgctcnccttgggttggngaaaaanngaagaannntnctgaaacnaggcggg

SEQ ID NO: 275 - DNA, 256 bp, Homo Sapiens
tagagaaattactatgagaggatcgcatcaccatcaccatcacggatcctatttaggtgacactatagaatcgtcgacccacgcgtccgcgcctgctgggcagggccggcgcggcccggccatggagtcctacgacatcatcgccaaccagcctgtggtcatcgacaacggttcgggggtgattaaagctggctttgcaggagaccagattcccaaatactgtttcccaaactatgtcgggcggccgaagcacatg

SEQ ID NO: 276 - DNA, 1200 bp, Homo Sapiens
  misc_feature (2)..(2): n is a, c, g, or t
  misc_feature (322)..(322): n is a, c, g, or t
  misc_feature (548)..(548): n is a, c, g, or t
  misc_feature (712)..(712): n is a, c, g, or t
  misc_feature (719)..(719): n is a, c, g, or t
  misc_feature (724)..(724): n is a, c, g, or t
  misc_feature (778)..(778): n is a, c, g, or t
  misc_feature (780)..(780): n is a, c, g, or t
  misc_feature (794)..(794): n is a, c, g, or t
  misc_feature (804)..(804): n is a, c, g, or t
  misc_feature (806)..(806): n is a, c, g, or t
  misc_feature (811)..(812): n is a, c, g, or t
  misc_feature (814)..(814): n is a, c, g, or t
  misc_feature (816)..(817): n is a, c, g, or t
  misc_feature (820)..(820): n is a, c, g, or t
  misc_feature (822)..(823): n is a, c, g, or t
  misc_feature (825)..(825): n is a, c, g, or t
  misc_feature (828)..(828): n is a, c, g, or t
  misc_feature (830)..(831): n is a, c, g, or t
  misc_feature (833)..(833): n is a, c, g, or t
  misc_feature (839)..(839): n is a, c, g, or t
  misc_feature (845)..(845): n is a, c, g, or t
  misc_feature (848)..(848): n is a, c, g, or t
  misc_feature (858)..(859): n is a, c, g, or t
  misc_feature (865)..(865): n is a, c, g, or t
  misc_feature (872)..(874): n is a, c, g, or t
  misc_feature (877)..(877): n is a, c, g, or t
  misc_feature (881)..(886): n is a, c, g, or t
  misc_feature (889)..(889): n is a, c, g, or t
  misc_feature (893)..(895): n is a, c, g, or t
  misc_feature (897)..(897): n is a, c, g, or t
  misc_feature (904)..(904): n is a, c, g, or t
  misc_feature (918)..(918): n is a, c, g, or t
  misc_feature (920)..(922): n is a, c, g, or t
  misc_feature (928)..(929): n is a, c, g, or t
  misc_feature (932)..(932): n is a, c, g, or t
  misc_feature (936)..(936): n is a, c, g, or t
  misc_feature (938)..(939): n is a, c, g, or t
  misc_feature (942)..(943): n is a, c, g, or t
  misc_feature (945)..(945): n is a, c, g, or t
  misc_feature (947)..(947): n is a, c, g, or t
  misc_feature (950)..(951): n is a, c, g, or t
  misc_feature (954)..(954): n is a, c, g, or t
  misc_feature (958)..(958): n is a, c, g, or t
  misc_feature (964)..(964): n is a, c, g, or t
  misc_feature (966)..(967): n is a, c, g, or t
  misc_feature (970)..(971): n is a, c, g, or t
  misc_feature (974)..(975): n is a, c, g, or t
  misc_feature (977)..(978): n is a, c, g, or t
  misc_feature (980)..(980): n is a, c, g, or t
  misc_feature (983)..(983): n is a, c, g, or t
  misc_feature (987)..(987): n is a, c, g, or t
  misc_feature (989)..(989): n is a, c, g, or t
  misc_feature (995)..(995): n is a, c, g, or t
  misc_feature (1003)..(1004): n is a, c, g, or t
  misc_feature (1009)..(1010): n is a, c, g, or t
  misc_feature (1017)..(1018): n is a, c, g, or t
  misc_feature (1020)..(1020): n is a, c, g, or t
  misc_feature (1030)..(1031): n is a, c, g, or t
  misc_feature (1034)..(1034): n is a, c, g, or t
  misc_feature (1038)..(1040): n is a, c, g, or t
  misc_feature (1046)..(1051): n is a, c, g, or t
  misc_feature (1064)..(1064): n is a, c, g, or t
  misc_feature (1066)..(1070): n is a, c, g, or t
  misc_feature (1073)..(1078): n is a, c, g, or t
  misc_feature (1081)..(1081): n is a, c, g, or t
  misc_feature (1088)..(1090): n is a, c, g, or t
  misc_feature (1096)..(1097): n is a, c, g, or t
  misc_feature (1099)..(1099): n is a, c, g, or t
  misc_feature (1101)..(1101): n is a, c, g, or t
  misc_feature (1108)..(1108): n is a, c, g, or t
  misc_feature (1110)..(1111): n is a, c, g, or t
  misc_feature (1114)..(1115): n is a, c, g, or t
  misc_feature (1122)..(1124): n is a, c, g, or t
  misc_feature (1126)..(1126): n is a, c, g, or t
  misc_feature (1130)..(1130): n is a, c, g, or t
  misc_feature (1133)..(1134): n is a, c, g, or t
  misc_feature (1144)..(1145): n is a, c, g, or t
  misc_feature (1151)..(1152): n is a, c, g, or t
  misc_feature (1156)..(1167): n is a, c, g, or t
  misc_feature (1171)..(1172): n is a, c, g, or t
  misc_feature (1175)..(1182): n is a, c, g, or t
  misc_feature (1185)..(1185): n is a, c, g, or t
  misc_feature (1188)..(1189): n is a, c, g, or t
  misc_feature (1193)..(1194): n is a, c, g, or t
  misc_feature (1196)..(1199): n is a, c, g, or t
antagagaaattactatgagaggatcgcatcaccatcaccatcacggatcctatttaggtgacactatagaatcgtcgacccacgcgtccggcctcgccagctcgccccggcactgcgcacttgccagccagtccgcccgtccggagcccggctcgctggggcagcatggcggggtcgccgctgctctgggggccgcgggccgggggcgtcggccttttggtgctgctgctgctcggcctgtttcggccgccccccgcgctctgcgcgcggccggtaaaggagccccgcggcctaagcgcagcgtctccgcccttggctganactggcgctcctcgccgcttccggcggtcagtgccccgaggtgaggcggcgggggcggtgcaggagctggcgcgggcgctggcgcatctgctggaggccgaacgtcaggagcgggcgcgggccgaggcgcaggaggctgaggatcagcaggcgcgcgtcctggcgcagctgctgcgcgtctggggcgccccccgcaactctgatccggctctgggcctggacgacnaccccgacgcgcctgcagcgcagctcgctcgcgctctgctccgcgcccgccttgaccctgccgccctcgcagcccagcttgtccccgcgcccgtccccgccgcggcgctccgaccccggcccccggtctacaacgacggccccgcgggcccggatgctgaagangcaggcnacaanacacccgacgtggaacccgaactgttgaagtacttgctgggacggattcttgcngnaaacgcggactccnaaggggtggnanccccnngncnnctncnncntgncnncnaacaanaatgtnggnctctgaactnncccccntgaaagnnntgnttgnnnnnnctncttnnntntaaaaancctaaaaaaacccngnnncccaanntgnctgnannccnncntnttnncancctnaaaaantnnccnnaanncnntnaancctngnaaaccnaaaaaatnnccccnncaatccnncnaaaaaaaatnnttncccnnnaaaaannnnnnaaaaaaaattaancnnnnnaannnnnnccntttaaannnaaaaanncntnaaccctngnnccnnaaaaaannnantttnaannaaaaaaaaannaaaaannaaannnnnnnnnnnncccnnaannnnnnnnaanaannttanntnnnna

SEQ ID NO: 277 - DNA, 1387 bp, Homo Sapiens
  misc_feature (1)..(1): n is a, c, g, or t
  misc_feature (4)..(4): n is a, c, g, or t
  misc_feature (583)..(583): n is a, c, g, or t
  misc_feature (588)..(588): n is a, c, g, or t
  misc_feature (599)..(599): n is a, c, g, or t
  misc_feature (603)..(603): n is a, c, g, or t
  misc_feature (621)..(621): n is a, c, g, or t
  misc_feature (691)..(691): n is a, c, g, or t
  misc_feature (722)..(722): n is a, c, g, or t
  misc_feature (739)..(739): n is a, c, g, or t
  misc_feature (748)..(748): n is a, c, g, or t
  misc_feature (770)..(770): n is a, c, g, or t
  misc_feature (783)..(783): n is a, c, g, or t
  misc_feature (785)..(785): n is a, c, g, or t
  misc_feature (791)..(791): n is a, c, g, or t
  misc_feature (797)..(797): n is a, c, g, or t
  misc_feature (803)..(803): n is a, c, g, or t
  misc_feature (806)..(806): n is a, c, g, or t
  misc_feature (808)..(808): n is a, c, g, or t
  misc_feature (822)..(822): n is a, c, g, or t
  misc_feature (827)..(827): n is a, c, g, or t
  misc_feature (848)..(848): n is a, c, g, or t
  misc_feature (856)..(856): n is a, c, g, or t
  misc_feature (858)..(858): n is a, c, g, or t
  misc_feature (860)..(860): n is a, c, g, or t
  misc_feature (865)..(865): n is a, c, g, or t
  misc_feature (868)..(868): n is a, c, g, or t
  misc_feature (871)..(871): n is a, c, g, or t
  misc_feature (883)..(883): n is a, c, g, or t
  misc_feature (898)..(898): n is a, c, g, or t
  misc_feature (906)..(906): n is a, c, g, or t
  misc_feature (945)..(945): n is a, c, g, or t
  misc_feature (949)..(949): n is a, c, g, or t
  misc_feature (956)..(956): n is a, c, g, or t
  misc_feature (962)..(962): n is a, c, g, or t
  misc_feature (977)..(977): n is a, c, g, or t
  misc_feature (981)..(981): n is a, c, g, or t
  misc_feature (984)..(984): n is a, c, g, or t
  misc_feature (987)..(987): n is a, c, g, or t
  misc_feature (991)..(991): n is a, c, g, or t
  misc_feature (998)..(998): n is a, c, g, or t
  misc_feature (1004)..(1004): n is a, c, g, or t
  misc_feature (1008)..(1009): n is a, c, g, or t
  misc_feature (1014)..(1015): n is a, c, g, or t
  misc_feature (1020)..(1020): n is a, c, g, or t
  misc_feature (1023)..(1023): n is a, c, g, or t
  misc_feature (1030)..(1030): n is a, c, g, or t
  misc_feature (1036)..(1036): n is a, c, g, or t
  misc_feature (1049)..(1049): n is a, c, g, or t
  misc_feature (1063)..(1063): n is a, c, g, or t
  misc_feature (1067)..(1067): n is a, c, g, or t
  misc_feature (1090)..(1090): n is a, c, g, or t
  misc_feature (1100)..(1100): n is a, c, g, or t
  misc_feature (1106)..(1106): n is a, c, g, or t
  misc_feature (1111)..(1111): n is a, c, g, or t
  misc_feature (1118)..(1121): n is a, c, g, or t
  misc_feature (1144)..(1144): n is a, c, g, or t
  misc_feature (1146)..(1146): n is a, c, g, or t
  misc_feature (1151)..(1152): n is a, c, g, or t
  misc_feature (1155)..(1155): n is a, c, g, or t
  misc_feature (1166)..(1166): n is a, c, g, or t
  misc_feature (1173)..(1173): n is a, c, g, or t
  misc_feature (1180)..(1180): n is a, c, g, or t
  misc_feature (1184)..(1184): n is a, c, g, or t
  misc_feature (1189)..(1189): n is a, c, g, or t
  misc_feature (1196)..(1196): n is a, c, g, or t
  misc_feature (1201)..(1206): n is a, c, g, or t
  misc_feature (1208)..(1208): n is a, c, g, or t
  misc_feature (1211)..(1211): n is a, c, g, or t
  misc_feature (1213)..(1214): n is a, c, g, or t
  misc_feature (1216)..(1216): n is a, c, g, or t
  misc_feature (1227)..(1227): n is a, c, g, or t
  misc_feature (1229)..(1229): n is a, c, g, or t
  misc_feature (1234)..(1234): n is a, c, g, or t
  misc_feature (1240)..(1240): n is a, c, g, or t
  misc_feature (1253)..(1253): n is a, c, g, or t
  misc_feature (1255)..(1256): n is a, c, g, or t
  misc_feature (1263)..(1263): n is a, c, g, or t
  misc_feature (1268)..(1268): n is a, c, g, or t
  misc_feature (1283)..(1284): n is a, c, g, or t
  misc_feature (1289)..(1289): n is a, c, g, or t
  misc_feature (1295)..(1297): n is a, c, g, or t
  misc_feature (1299)..(1299): n is a, c, g, or t
  misc_feature (1313)..(1313): n is a, c, g, or t
  misc_feature (1326)..(1326): n is a, c, g, or t
  misc_feature (1330)..(1330): n is a, c, g, or t
  misc_feature (1336)..(1338): n is a, c, g, or t
  misc_feature (1341)..(1341): n is a, c, g, or t
  misc_feature (1360)..(1360): n is a, c, g, or t
  misc_feature (1371)..(1371): n is a, c, g, or t
  misc_feature (1380)..(1380): n is a, c, g, or t
  misc_feature (1384)..(1384): n is a, c, g, or t
  misc_feature (1386)..(1386): n is a, c, g, or t
naantagagaaattactatgagaggatcgcatcaccatcaccatcacggatcctatttaggtgacactatagaatcgtcgacccacgcgtccggattaagtgtggctgatcttattgaatccatgttgaaaaatctatccaggattcatcccgtgtcaacaatggtaaaggggatgtatggcattgagaatgaagtcttcctgagccttccatgtatcctcaatgcccggggattaaccagcgttatcaaccagaagctaaaggatgatgaggttgctcagctcaagaaaagtgcagataccctgtgggacatccagaaggacctaaaagacctgtgactagtgagctctaggctgtagaaatttaaaaactacaatgtgattaactcgagcctttagttttcatccatgtacatggatcacagtttgctttgatcttcttcaatatgtgaatttgggctcacagaatcaaagcctatgcttggtttaatgcttgcaatctgagctcttgaacaaataaaattaactattgtagtgtgaaaaaaaaaaaaaaaaaaaaaaaaaaaaaaaaaaaaaaaaagggnggccnctccctatagngagncgaattaagcttaattanctgagcttggactcctgttgatagatccagtaatgacctcaaaactccatctggatttgttcaaaacgcncggttgccgccgggcgttttttattggtganaatccaagctagcttgncgaaatttncaggagctaaggaagctaaaanggaaaaaaaaaancnctgganataccnccggtnaananaatccccaatggcntccgnaaaaaaacatttttggaggcnttttcaancngnttgcncantgnaaccctaataanccaagacccgttcangctggaanataaccggcccttttttaaagaaccggtaaaaaaaaaanaaancccaaantttttnatccgggccttttanttcnacnttntttnccccccncgaaanaaannctccnncccgnaantttcccnaaaggnaaatggaaaaaanggggaacctggggnaatngagaaaaaggtgttccccccctngtttaccccntttttnccagnaaccaannnnaaacccttttccccccctccggnanggaannccnccaacaatttnccggganttttccnaaanaaaanttccccnaagannnnnncngtntnncngggaaaacccngngcccntttccncaaaggggttttntnngaaaaangtttntttccccccccccannccccngggggnnntntcccccagttttanttaaaacgggccnaaanggaaannntcnctcccccccctttttcccngggggaaaaantttcccccngggnang

SEQ ID NO: 278 - DNA, 256 bp, Homo Sapiens
  misc_feature (2)..(2): n is a, c, g, or t
  misc_feature (6)..(6): n is a, c, g, or t
  misc_feature (10)..(10): n is a, c, g, or t
  misc_feature (17)..(17): n is a, c, g, or t
  misc_feature (19)..(19): n is a, c, g, or t
  misc_feature (22)..(22): n is a, c, g, or t
  misc_feature (28)..(28): n is a, c, g, or t
  misc_feature (31)..(32): n is a, c, g, or t
  misc_feature (35)..(35): n is a, c, g, or t
  misc_feature (42)..(48): n is a, c, g, or t
  misc_feature (50)..(51): n is a, c, g, or t
  misc_feature (53)..(55): n is a, c, g, or t
  misc_feature (61)..(61): n is a, c, g, or t
  misc_feature (63)..(63): n is a, c, g, or t
  misc_feature (67)..(69): n is a, c, g, or t
  misc_feature (71)..(71): n is a, c, g, or t
  misc_feature (78)..(79): n is a, c, g, or t
  misc_feature (82)..(84): n is a, c, g, or t
  misc_feature (88)..(88): n is a, c, g, or t
  misc_feature (91)..(91): n is a, c, g, or t
  misc_feature (94)..(94): n is a, c, g, or t
  misc_feature (108)..(108): n is a, c, g, or t
  misc_feature (118)..(119): n is a, c, g, or t
  misc_feature (123)..(123): n is a, c, g, or t
  misc_feature (131)..(132): n is a, c, g, or t
  misc_feature (134)..(134): n is a, c, g, or t
  misc_feature (137)..(137): n is a, c, g, or t
  misc_feature (147)..(148): n is a, c, g, or t
  misc_feature (151)..(153): n is a, c, g, or t
  misc_feature (157)..(157): n is a, c, g, or t
  misc_feature (159)..(159): n is a, c, g, or t
  misc_feature (162)..(162): n is a, c, g, or t
  misc_feature (167)..(167): n is a, c, g, or t
  misc_feature (171)..(172): n is a, c, g, or t
  misc_feature (177)..(177): n is a, c, g, or t
  misc_feature (179)..(179): n is a, c, g, or t
  misc_feature (181)..(181): n is a, c, g, or t
  misc_feature (183)..(183): n is a, c, g, or t
  misc_feature (189)..(189): n is a, c, g, or t
  misc_feature (191)..(192): n is a, c, g, or t
  misc_feature (195)..(195): n is a, c, g, or t
  misc_feature (200)..(202): n is a, c, g, or t
  misc_feature (209)..(209): n is a, c, g, or t
  misc_feature (215)..(215): n is a, c, g, or t
  misc_feature (222)..(223): n is a, c, g, or t
  misc_feature (230)..(230): n is a, c, g, or t
  misc_feature (233)..(234): n is a, c, g, or t
  misc_feature (242)..(242): n is a, c, g, or t
  misc_feature (252)..(252): n is a, c, g, or t
  misc_feature (256)..(256): n is a, c, g, or t
gnctantggngccgctncnccncccccnccnnccnggaaagnnnnnnncnncnnnctggcncngccnnntncgcgccnncgnnnccantcnccntcaccatgctgaantttttttgannctcnccctttanncntcnccgcacgctnnctnnnaggncncgncgggnccgnncgggnangncngccgancnnagncgggnnncccgggncccccnccccccnncgccctnctnnaaatatgnaaaataatcntatn

SEQ ID NO: 279 - DNA, 1200 bp, Homo Sapiens
  misc_feature (795)..(796): n is a, c, g, or t
  misc_feature (808)..(808): n is a, c, g, or t
  misc_feature (810)..(810): n is a, c, g, or t
  misc_feature (813)..(817): n is a, c, g, or t
  misc_feature (819)..(819): n is a, c, g, or t
  misc_feature (821)..(822): n is a, c, g, or t
  misc_feature (825)..(825): n is a, c, g, or t
  misc_feature (828)..(829): n is a, c, g, or t
  misc_feature (833)..(834): n is a, c, g, or t
  misc_feature (836)..(836): n is a, c, g, or t
  misc_feature (860)..(860): n is a, c, g, or t
  misc_feature (889)..(889): n is a, c, g, or t
  misc_feature (893)..(893): n is a, c, g, or t
  misc_feature (898)..(898): n is a, c, g, or t
  misc_feature (901)..(901): n is a, c, g, or t
  misc_feature (911)..(911): n is a, c, g, or t
  misc_feature (920)..(920): n is a, c, g, or t
  misc_feature (936)..(936): n is a, c, g, or t
  misc_feature (938)..(938): n is a, c, g, or t
  misc_feature (943)..(943): n is a, c, g, or t
  misc_feature (961)..(961): n is a, c, g, or t
  misc_feature (967)..(967): n is a, c, g, or t
  misc_feature (974)..(975): n is a, c, g, or t
  misc_feature (981)..(982): n is a, c, g, or t
  misc_feature (989)..(989): n is a, c, g, or t
  misc_feature (1008)..(1008): n is a, c, g, or t
  misc_feature (1012)..(1012): n is a, c, g, or t
  misc_feature (1021)..(1021): n is a, c, g, or t
  misc_feature (1023)..(1023): n is a, c, g, or t
  misc_feature (1029)..(1029): n is a, c, g, or t
  misc_feature (1039)..(1039): n is a, c, g, or t
  misc_feature (1041)..(1041): n is a, c, g, or t
  misc_feature (1048)..(1048): n is a, c, g, or t
  misc_feature (1063)..(1065): n is a, c, g, or t
  misc_feature (1073)..(1073): n is a, c, g, or t
  misc_feature (1080)..(1080): n is a, c, g, or t
  misc_feature (1084)..(1084): n is a, c, g, or t
  misc_feature (1087)..(1088): n is a, c, g, or t
  misc_feature (1091)..(1091): n is a, c, g, or t
  misc_feature (1105)..(1105): n is a, c, g, or t
  misc_feature (1121)..(1121): n is a, c, g, or t
  misc_feature (1130)..(1131): n is a, c, g, or t
  misc_feature (1134)..(1134): n is a, c, g, or t
  misc_feature (1138)..(1138): n is a, c, g, or t
  misc_feature (1140)..(1140): n is a, c, g, or t
  misc_feature (1146)..(1148): n is a, c, g, or t
  misc_feature (1153)..(1153): n is a, c, g, or t
  misc_feature (1162)..(1162): n is a, c, g, or t
  misc_feature (1165)..(1165): n is a, c, g, or t
  misc_feature (1168)..(1168): n is a, c, g, or t
  misc_feature (1170)..(1170): n is a, c, g, or t
  misc_feature (1172)..(1172): n is a, c, g, or t
  misc_feature (1178)..(1178): n is a, c, g, or t
  misc_feature (1183)..(1184): n is a, c, g, or t
  misc_feature (1193)..(1193): n is a, c, g, or t
  misc_feature (1196)..(1196): n is a, c, g, or t
tagagaaattaactatgagaggatcgcatcaccattcaccatcacggatcctatttaggtgacactatagaatcgtcgacccacgcgtccgcccacgcgtccgccagctgcccaccctctggacattcacccagccaggtggtctcgtcacctcagaggctccgccagactcctgcccaggccaggactgaggcaagcctcaaggcacttctaggacctgcctcttctcaccaagatgaactcactggtttcttggcagctactgcttttcctctgtgccacccactttggggagccattagaaaaggtggcctctgtggggaattctagacccacaggccagcagctagaatccctgggcctcctggcccccggggagcagagcctgccgtgcaccgagaggaagccagctgctactgccaggctgagccgtcgggggacctcgctgtccccgccccccgagagctccgggagcccccagcagccgggcctgtccgccccccacagccgccagatccccgcaccccagggcgcggtgctggtgcagcgggagaaggacctgccgaactacaactggaactccttcggcctgcgcttcggcaagcgggaggcggcaccagggaaccacggcagaagcgctgggcggggctgagggcgcaggtgcggggcagtgaacttcagaccccaaaggagtcagagcatgcggggcgggggcggggggcggggacgtagggctaagggagggggcgctggagcttccaacccgaggcaataaaagaaatgttgcgtaactcnnaaaaaaaaaaananaannnnnanannaanaannttanntnaaaagggcgggccgcttcccttanagtgaagtcgtaattaaacttaaattaantgancttgnaantcctgttganaaaatccanttaatgacctcaaaantncctcntggaatttgtttaaaaancctcgntttgccnnccgggnnttttttnttggggaaaaatccaaacntagnttggggaananttttcnggagctaagnancttaaantggaaaaaaaaaatnnntggaaaanacccccntttnaannttnccattgggattctnaaaaaaaatttttganggattttannccntttngnccaagnnnccttnaaacaaaancgnttnangnaaattnaggcnnttttaaaancgnaaaa

SEQ ID NO: 280 - DNA, 1361 bp, Homo Sapiens
  misc_feature (836)..(836): n is a, c, g, or t
  misc_feature (855)..(855): n is a, c, g, or t
  misc_feature (857)..(857): n is a, c, g, or t
  misc_feature (872)..(872): n is a, c, g, or t
  misc_feature (891)..(891): n is a, c, g, or t
  misc_feature (909)..(909): n is a, c, g, or t
  misc_feature (914)..(914): n is a, c, g, or t
  misc_feature (929)..(929): n is a, c, g, or t
  misc_feature (933)..(933): n is a, c, g, or t
  misc_feature (938)..(938): n is a, c, g, or t
  misc_feature (945)..(945): n is a, c, g, or t
  misc_feature (961)..(961): n is a, c, g, or t
  misc_feature (968)..(968): n is a, c, g, or t
  misc_feature (972)..(972): n is a, c, g, or t
  misc_feature (980)..(980): n is a, c, g, or t
  misc_feature (996)..(996): n is a, c, g, or t
  misc_feature (1017)..(1017): n is a, c, g, or t
  misc_feature (1028)..(1028): n is a, c, g, or t
  misc_feature (1033)..(1033): n is a, c, g, or t
  misc_feature (1047)..(1047): n is a, c, g, or t
  misc_feature (1063)..(1063): n is a, c, g, or t
  misc_feature (1077)..(1077): n is a, c, g, or t
  misc_feature (1088)..(1088): n is a, c, g, or t
  misc_feature (1096)..(1096): n is a, c, g, or t
  misc_feature (1120)..(1120): n is a, c, g, or t
  misc_feature (1124)..(1124): n is a, c, g, or t
  misc_feature (1126)..(1126): n is a, c, g, or t
  misc_feature (1131)..(1131): n is a, c, g, or t
  misc_feature (1134)..(1134): n is a, c, g, or t
  misc_feature (1139)..(1139): n is a, c, g, or t
  misc_feature (1143)..(1143): n is a, c, g, or t
  misc_feature (1151)..(1151): n is a, c, g, or t
  misc_feature (1166)..(1166): n is a, c, g, or t
  misc_feature (1168)..(1168): n is a, c, g, or t
  misc_feature (1172)..(1172): n is a, c, g, or t
  misc_feature (1181)..(1181): n is a, c, g, or t
  misc_feature (1183)..(1184): n is a, c, g, or t
  misc_feature (1189)..(1190): n is a, c, g, or t
  misc_feature (1201)..(1201): n is a, c, g, or t
  misc_feature (1214)..(1214): n is a, c, g, or t
  misc_feature (1232)..(1232): n is a, c, g, or t
  misc_feature (1244)..(1244): n is a, c, g, or t
  misc_feature (1247)..(1247): n is a, c, g, or t
  misc_feature (1256)..(1256): n is a, c, g, or t
  misc_feature (1263)..(1263): n is a, c, g, or t
  misc_feature (1275)..(1275): n is a, c, g, or t
  misc_feature (1280)..(1280): n is a, c, g, or t
  misc_feature (1283)..(1283): n is a, c, g, or t
  misc_feature (1287)..(1287): n is a, c, g, or t
  misc_feature (1291)..(1291): n is a, c, g, or t
  misc_feature (1298)..(1298): n is a, c, g, or t
  misc_feature (1300)..(1304): n is a, c, g, or t
  misc_feature (1307)..(1307): n is a, c, g, or t
  misc_feature (1310)..(1313): n is a, c, g, or t
  misc_feature (1316)..(1316): n is a, c, g, or t
  misc_feature (1319)..(1319): n is a, c, g, or t
  misc_feature (1321)..(1322): n is a, c, g, or t
  misc_feature (1324)..(1325): n is a, c, g, or t
  misc_feature (1327)..(1327): n is a, c, g, or t
  misc_feature (1332)..(1332): n is a, c, g, or t
  misc_feature (1335)..(1337): n is a, c, g, or t
  misc_feature (1341)..(1341): n is a, c, g, or t
  misc_feature (1344)..(1344): n is a, c, g, or t
  misc_feature (1351)..(1355): n is a, c, g, or t
  misc_feature (1358)..(1358): n is a, c, g, or t
gagagaattactatgagaggatcgcatcaccatcaccatcacggatcctatttaggtgacactatagaatcgtcgacccacgcgtccggacacagcagcacaccagaccacaccagcacactggagcctcctcgtttgcctcaaagaaagaacttacaaagtgaaaaggaaacttatcagctgtctaaggaagtggaaattttatctaggaacctggttgaaatgcaacggtgtctttctgaacttacaaaccgtctgcataatgggaagaaatcctcttcagtgtatccactctctcaagatcttccttatgttcacatcatttaccagaaaccttattatctaggtcctgttgttgaaaaaagagcggtgcttctctgtgatggtaaactaaggctcagtacagttcagcagacttttggcctttctctcattgaaatgctacatgattcccactggattcttctctctgctgacagtgagggctttatcccgttaaccttcacagccacacaggaaataatcataagagatggcagcctgtccaggtcagatgtcttcagagactctttttctcacagtccaggtgctgtttcttctcttaaagtctttacaggccttgctgcccccagtttagataccactggctgttgtaaccatgtagatggcatggcttgatatctgcagtgtccttgctgtgtagctcttcagatgagaccattacaaacaaggcctgcttgacactggacactcgccaatgagactcccactgcactcaggcgaagcgcttgccatggtcggctctcctggtttccccctgtttcccctgagctgangctcgctgctgtgtagcananctcagtctttattanatggctccgaaagtggtgnttatgtattcatgactgngtggntttgactaagggcanaatnctcanaacaaancaatattatggggccntatggangggntttatggnttctctgaggctttgngtcccttgtccaagctgcatngaagctgtctnagganccttaaaaaaaccntggcatggttaaaggnctttttctgggctncaaaagaggtngagaatcngctgggggctgggccctaccaatnaccncnacccncanaattncaanccccaggngaccaaaaccctggntntgcnccagaaagnannggccnnagtgccggacnccaaattaacaancccttgttcttaaaattnggggaaaaggcnggnacttaaaanggccggnaatttaaaaatnagganttncccngggncctgggngnnnnnccnccnnnnccnaancnngnntnggggnccnnngccnaanttttttnnnnnggnccc

SEQ ID NO: 281 - DNA, 1135 bp, Homo Sapiens
  misc_feature (7)..(7): n is a, c, g, or t
  misc_feature (13)..(13): n is a, c, g, or t
  misc_feature (716)..(716): n is a, c, g, or t
  misc_feature (736)..(736): n is a, c, g, or t
  misc_feature (755)..(755): n is a, c, g, or t
  misc_feature (798)..(798): n is a, c, g, or t
  misc_feature (815)..(815): n is a, c, g, or t
  misc_feature (818)..(818): n is a, c, g, or t
  misc_feature (845)..(845): n is a, c, g, or t
  misc_feature (848)..(848): n is a, c, g, or t
  misc_feature (878)..(878): n is a, c, g, or t
  misc_feature (880)..(880): n is a, c, g, or t
  misc_feature (886)..(886): n is a, c, g, or t
  misc_feature (896)..(896): n is a, c, g, or t
  misc_feature (906)..(906): n is a, c, g, or t
  misc_feature (952)..(952): n is a, c, g, or t
  misc_feature (957)..(957): n is a, c, g, or t
  misc_feature (959)..(959): n is a, c, g, or t
  misc_feature (981)..(982): n is a, c, g, or t
  misc_feature (989)..(990): n is a, c, g, or t
  misc_feature (998)..(998): n is a, c, g, or t
  misc_feature (1002)..(1002): n is a, c, g, or t
  misc_feature (1005)..(1005): n is a, c, g, or t
  misc_feature (1008)..(1009): n is a, c, g, or t
  misc_feature (1013)..(1013): n is a, c, g, or t
  misc_feature (1016)..(1016): n is a, c, g, or t
  misc_feature (1024)..(1024): n is a, c, g, or t
  misc_feature (1027)..(1028): n is a, c, g, or t
  misc_feature (1035)..(1037): n is a, c, g, or t
  misc_feature (1043)..(1044): n is a, c, g, or t
  misc_feature (1052)..(1053): n is a, c, g, or t
  misc_feature (1061)..(1061): n is a, c, g, or t
  misc_feature (1063)..(1063): n is a, c, g, or t
  misc_feature (1067)..(1067): n is a, c, g, or t
  misc_feature (1070)..(1070): n is a, c, g, or t
  misc_feature (1075)..(1077): n is a, c, g, or t
  misc_feature (1081)..(1081): n is a, c, g, or t
  misc_feature (1100)..(1100): n is a, c, g, or t
  misc_feature (1116)..(1116): n is a, c, g, or t
  misc_feature (1123)..(1123): n is a, c, g, or t
  misc_feature (1130)..(1130): n is a, c, g, or t
  misc_feature (1133)..(1133): n is a, c, g, or t
aagaatnagaganaattactatgagaggatcgcatcaccatcaccattcacggatcctatttaggtgacactatagaatcgtcgacccacgcgtccgggcaaaaagagaagaaagaaaggggagggggcgagtcacaggcggcggtggcggcggcagcagctgccggagcggaggcaacgagcagtccgagaaaaaccagcagcagcggcggcggcggcggcggcggcgcccaccccgaccagctgcagcatctgcatccccgctcctgggaactggagcgagcggtgccgggccagcaggcgaggggggcgacgcgcagacagcgggtcagagcgcgggcgcgcggggaccgtgcagcctgcgcgcggggccatgtaaactatctaactgtggtgtggccctcttttctctgccatagcaattcaagaatcagaggtgatttgctcttgatgggagacatgaactattatatcatcagttgaacctgcttttagccactgagcagagcaaaacaataagatccaatacaccaactgtgatggttaatactgtcaacttgattggattgaacaatgcaaagtattgatcctgggtgtgtctgtgtgggtgttgccaaaggagattaacatttgagtcagtgggctggggaaggcagacccacccttaacctggtgggcacagtctaatcagctgccagtgaatatgaagcaggaanaaagacagtgaaaaggtganactggcctggcctccccanccctacatctttctcccatgctggatgcttcctgtcctcaaanactggaactccacgttnttncacttttgaaaacttgaaactgggctngtnccttttgcctccttcaaagctttgcaaaanangccctnattgtggggnaaactttgtnaattgtggtaaaattgaaatattaccaataaaattttccccctttntaatntnattattattatattttaatatnntatattnntattttanattnttntcnncccnggnaaaaattnttnntcccctnnntagggnnaaccctgnnatttattntncccnacnaccannnaatntttttatttttttgggggnaaaaaaaaaaaaaatncctttgncaaaaanaanaa

SEQ ID NO: 282 - DNA, 1232 bp, Homo Sapiens
  misc_feature (856)..(856): n is a, c, g, or t
  misc_feature (929)..(929): n is a, c, g, or t
  misc_feature (940)..(940): n is a, c, g, or t
  misc_feature (965)..(965): n is a, c, g, or t
  misc_feature (1008)..(1008): n is a, c, g, or t
  misc_feature (1017)..(1017): n is a, c, g, or t
  misc_feature (1019)..(1019): n is a, c, g, or t
  misc_feature (1027)..(1027): n is a, c, g, or t
  misc_feature (1031)..(1031): n is a, c, g, or t
  misc_feature (1036)..(1036): n is a, c, g, or t
  misc_feature (1049)..(1049): n is a, c, g, or t
  misc_feature (1051)..(1051): n is a, c, g, or t
  misc_feature (1053)..(1053): n is a, c, g, or t
  misc_feature (1071)..(1071): n is a, c, g, or t
  misc_feature (1086)..(1086): n is a, c, g, or t
  misc_feature (1096)..(1096): n is a, c, g, or t
  misc_feature (1099)..(1099): n is a, c, g, or t
  misc_feature (1105)..(1106): n is a, c, g, or t
  misc_feature (1121)..(1121): n is a, c, g, or t
  misc_feature (1124)..(1124): n is a, c, g, or t
  misc_feature (1126)..(1126): n is a, c, g, or t
  misc_feature (1128)..(1128): n is a, c, g, or t
  misc_feature (1135)..(1135): n is a, c, g, or t
  misc_feature (1138)..(1138): n is a, c, g, or t
  misc_feature (1147)..(1147): n is a, c, g, or t
  misc_feature (1157)..(1157): n is a, c, g, or t
  misc_feature (1168)..(1168): n is a, c, g, or t
  misc_feature (1172)..(1172): n is a, c, g, or t
  misc_feature (1176)..(1176): n is a, c, g, or t
  misc_feature (1178)..(1178): n is a, c, g, or t
  misc_feature (1188)..(1188): n is a, c, g, or t
  misc_feature (1190)..(1190): n is a, c, g, or t
  misc_feature (1192)..(1192): n is a, c, g, or t
  misc_feature (1199)..(1199): n is a, c, g, or t
  misc_feature (1203)..(1203): n is a, c, g, or t
  misc_feature (1205)..(1205): n is a, c, g, or t
  misc_feature (1207)..(1207): n is a, c, g, or t
  misc_feature (1211)..(1211): n is a, c, g, or t
  misc_feature (1221)..(1221): n is a, c, g, or t
  misc_feature (1228)..(1228): n is a, c, g, or t
agagaaattactatgagaggatcgcatcaccatcaccatcacggatcctatttaggtgacactatagaatcgtcgacccacgcgtccgggcaaataaccatggagaagactccaagttactttgtgacaaatgaggctcccaagcgcattcactccatggccaaggacatcaaactgattgtggtggtgagaaaccccgtgaccagggccatctctgactacacgcagacactgtcaaagaaacccgagatccccacctttgaggtgctggccttcaaaaaccggaccctcgggctgatcgatgcttcctggagtgccattcgaatagggatctatgcgctgcatctggaaaactggctccagtatttccccctctcccagatcctctttgtcagtggtgagcgactcattgtggaccccgccggggaaatggccaaagtacaggattttctaggcctcaaacgtgttgtgactgagaagcatttctatttcaacaaaaccaaggggttcccttgcctaaagaagccagaagacagcagtgccccgaggtgcttaggcaagagcaaaggtcggactcatcctcgcattgacccagatgtcatccacagactgaggaaattctacaaacccttcaacttgatgttttaccaaatgactggtcaagattttcagtgggaacaggaagagggtgataaatgaggctagagaggcagaggaaggctagtcaataagctaaggaggctccttgcctgagtccttgaataccccagcttctgcagcttcacttgctggagtgccaagtagatctcctcctccttcatgcagccaggaattgcctccagtgctgttagcttangcaaacaggtggatcccatggcatccccatggaggaaccaggcccatctgggcagcagcatctggttgaccanatggccaccanaaccccctgttcattcttatcttcngctagttaaatagcctgaagacaaggataaatagttgtcatgntcaaaaacngngctattantgtntatgngagcgacaaaaangntntgctttaaggggttctcnctctacctggggganaccagggttntanccctgnntttgtcaggggcccntgntntnaaaaccntgnttgggcttncccccaaaangccctttgggngganggcncnagaatcctangnanagggccncccncnangggntttcagcctnctttaanggcc

SEQ ID NO: 283 - DNA, 256 bp, Homo Sapiens
  misc_feature (2)..(2): n is a, c, g, or t
tnactatgagaggatcgcatcaccatcaccatcacggatcctatttaggtgacactatagaatcgtcgacccacgcgtccgcccacgcgtccgcggacgcgtgggcggtcgcaatggaagaagagatcgccgcgctggtcattgacaatggctccggcatgtgcaaagctggttttgctggggacgacgctccccgagccgtgtttccttccatcgtcgggcgccccagacaccagggcgtcatggtgggcatggg

SEQ ID NO: 284 - DNA, 1326 bp, Homo Sapiens
  misc_feature (14)..(14): n is a, c, g, or t
  misc_feature (558)..(558): n is a, c, g, or t
  misc_feature (673)..(673): n is a, c, g, or t
  misc_feature (687)..(687): n is a, c, g, or t
  misc_feature (696)..(696): n is a, c, g, or t
  misc_feature (703)..(703): n is a, c, g, or t
  misc_feature (706)..(706): n is a, c, g, or t
  misc_feature (715)..(715): n is a, c, g, or t
  misc_feature (719)..(719): n is a, c, g, or t
  misc_feature (744)..(745): n is a, c, g, or t
  misc_feature (757)..(757): n is a, c, g, or t
  misc_feature (776)..(776): n is a, c, g, or t
  misc_feature (778)..(778): n is a, c, g, or t
  misc_feature (782)..(782): n is a, c, g, or t
  misc_feature (789)..(789): n is a, c, g, or t
  misc_feature (802)..(802): n is a, c, g, or t
  misc_feature (804)..(804): n is a, c, g, or t
  misc_feature (816)..(816): n is a, c, g, or t
  misc_feature (818)..(818): n is a, c, g, or t
  misc_feature (825)..(826): n is a, c, g, or t
  misc_feature (831)..(833): n is a, c, g, or t
  misc_feature (835)..(835): n is a, c, g, or t
  misc_feature (838)..(838): n is a, c, g, or t
  misc_feature (841)..(842): n is a, c, g, or t
  misc_feature (844)..(845): n is a, c, g, or t
  misc_feature (847)..(849): n is a, c, g, or t
  misc_feature (852)..(852): n is a, c, g, or t
  misc_feature (854)..(856): n is a, c, g, or t
  misc_feature (858)..(860): n is a, c, g, or t
  misc_feature (867)..(867): n is a, c, g, or t
  misc_feature (869)..(869): n is a, c, g, or t
  misc_feature (872)..(872): n is a, c, g, or t
  misc_feature (877)..(877): n is a, c, g, or t
  misc_feature (882)..(882): n is a, c, g, or t
  misc_feature (884)..(884): n is a, c, g, or t
  misc_feature (888)..(895): n is a, c, g, or t
  misc_feature (897)..(898): n is a, c, g, or t
  misc_feature (900)..(902): n is a, c, g, or t
  misc_feature (905)..(912): n is a, c, g, or t
  misc_feature (914)..(919): n is a, c, g, or t
  misc_feature (921)..(922): n is a, c, g, or t
  misc_feature (925)..(929): n is a, c, g, or t
  misc_feature (931)..(939): n is a, c, g, or t
  misc_feature (941)..(946): n is a, c, g, or t
  misc_feature (949)..(955): n is a, c, g, or t
  misc_feature (958)..(958): n is a, c, g, or t
  misc_feature (960)..(965): n is a, c, g, or t
  misc_feature (968)..(972): n is a, c, g, or t
  misc_feature (974)..(988): n is a, c, g, or t
  misc_feature (990)..(991): n is a, c, g, or t
  misc_feature (993)..(1014): n is a, c, g, or t
  misc_feature (1016)..(1021): n is a, c, g, or t
  misc_feature (1023)..(1044): n is a, c, g, or t
  misc_feature (1046)..(1066): n is a, c, g, or t
  misc_feature (1068)..(1079): n is a, c, g, or t
  misc_feature (1081)..(1087): n is a, c, g, or t
  misc_feature (1089)..(1091): n is a, c, g, or t
  misc_feature (1093)..(1154): n is a, c, g, or t
  misc_feature (1156)..(1160): n is a, c, g, or t
  misc_feature (1163)..(1188): n is a, c, g, or t
  misc_feature (1190)..(1190): n is a, c, g, or t
  misc_feature (1192)..(1295): n is a, c, g, or t
  misc_feature (1297)..(1322): n is a, c, g, or t
  misc_feature (1324)..(1326): n is a, c, g, or t
tagagaaaattacnatgagaggatcgcatcaccatcaccatcacggatcctatttaggtgacacatatagaatcgtcgacccacgcgtccgcccgtttccagcggtgccgccctgggtcccatcttcagggaaaggcactgcccacgccaggctgcacttccaacaacgggcagcagagggcgcggggcggctccgacgcgggtccaagggcagcttcccgctcaaccagggcaccaggacgaggtggctgtagctcggacggacggaagtagatggagggggtggggacggcctgtaagcggggggtgcctgcctggctggggagccccagggatagcggtcggacttcaggttctggccaaggctgagggaccctggctgcagcggatcggcacgccgggtgggcgagagcttggcctgcatgtgcctcccacagaccctggggtgatggccttccccctcttggccgggacgttgccccacgttgagtcccacacaacatcctgtgagcctggctccccaggagggcccccagacagctcccaggcacgtcatangcaaagcctgttcccccgactcaggatttccagggcctggggtcctgctcacccccctttgctctcacgcccagcctgtccccaggtttcagctgggagaggccacctccctcanccaaggaaaacganaacccccanggtacangangaggctggngcangtccccttgggtgtcactccctcannccctgcccaggnccactcccgctggtgctgnantacncactggngggggggccctgntnacccaaccttgnanggtccanntgtcnnnanaancanngnnannnaanannntnnnatggttntnaanccaanggccncnaatnnnnnnnnanngnnnggnnnnnnnnannnnnncnnaannnnnannnnnnnnnannnnnnaannnnnnncanannnnnnaannnnntnnnnnnnnnnnnnnnannannnnnnnnnnnnnnnnnnnnnntnnnnnnannnnnnnnnnnnnnnnnnnnnnannnnnnnnnnnnnnnnnnnnnannnnnnnnnnnntnnnnnnnannnannnnnnnnnnnnnnnnnnnnnnnnnnnnnnnnnnnnnnnnnnnnnnnnnnnnnnnnnnnnnnannnnnaannnnnnnnnnnnnnnnnnnnnnnnnntntnnnnnnnnnnnnnnnnnnnnnnnnnnnnnnnnnnnnnnnnnnnnnnnnnnnnnnnnnnnnnnnnnnnnnnnnnnnnnnnnnnnnnnnnnnnnnnnnnnnnnnnnannnnnnnnnnnnnnnnnnnnnnnnnntnnn

SEQ ID NO: 285 - DNA, 1270 bp, Homo Sapiens
  misc_feature (541)..(541): n is a, c, g, or t
  misc_feature (585)..(585): n is a, c, g, or t
  misc_feature (597)..(597): n is a, c, g, or t
  misc_feature (600)..(600): n is a, c, g, or t
  misc_feature (603)..(603): n is a, c, g, or t
  misc_feature (611)..(611): n is a, c, g, or t
  misc_feature (616)..(616): n is a, c, g, or t
  misc_feature (620)..(620): n is a, c, g, or t
  misc_feature (631)..(631): n is a, c, g, or t
  misc_feature (640)..(640): n is a, c, g, or t
  misc_feature (649)..(650): n is a, c, g, or t
  misc_feature (652)..(652): n is a, c, g, or t
  misc_feature (656)..(656): n is a, c, g, or t
  misc_feature (660)..(660): n is a, c, g, or t
  misc_feature (664)..(667): n is a, c, g, or t
  misc_feature (669)..(670): n is a, c, g, or t
  misc_feature (672)..(672): n is a, c, g, or t
  misc_feature (675)..(675): n is a, c, g, or t
  misc_feature (680)..(680): n is a, c, g, or t
  misc_feature (682)..(682): n is a, c, g, or t
  misc_feature (684)..(685): n is a, c, g, or t
  misc_feature (687)..(687): n is a, c, g, or t
  misc_feature (689)..(689): n is a, c, g, or t
  misc_feature (691)..(691): n is a, c, g, or t
  misc_feature (695)..(695): n is a, c, g, or t
  misc_feature (699)..(699): n is a, c, g, or t
  misc_feature (702)..(702): n is a, c, g, or t
  misc_feature (711)..(712): n is a, c, g, or t
  misc_feature (722)..(722): n is a, c, g, or t
  misc_feature (734)..(734): n is a, c, g, or t
  misc_feature (736)..(736): n is a, c, g, or t
  misc_feature (748)..(748): n is a, c, g, or t
  misc_feature (751)..(751): n is a, c, g, or t
  misc_feature (753)..(753): n is a, c, g, or t
  misc_feature (764)..(764): n is a, c, g, or t
  misc_feature (774)..(774): n is a, c, g, or t
  misc_feature (777)..(779): n is a, c, g, or t
  misc_feature (783)..(784): n is a, c, g, or t
  misc_feature (792)..(792): n is a, c, g, or t
  misc_feature (794)..(794): n is a, c, g, or t
  misc_feature (801)..(801): n is a, c, g, or t
  misc_feature (806)..(806): n is a, c, g, or t
  misc_feature (817)..(818): n is a, c, g, or t
  misc_feature (820)..(821): n is a, c, g, or t
  misc_feature (849)..(849): n is a, c, g, or t
  misc_feature (852)..(852): n is a, c, g, or t
  misc_feature (861)..(862): n is a, c, g, or t
  misc_feature (865)..(865): n is a, c, g, or t
  misc_feature (867)..(867): n is a, c, g, or t
  misc_feature (875)..(875): n is a, c, g, or t
  misc_feature (879)..(880): n is a, c, g, or t
  misc_feature (882)..(882): n is a, c, g, or t
  misc_feature (884)..(884): n is a, c, g, or t
  misc_feature (892)..(892): n is a, c, g, or t
  misc_feature (899)..(900): n is a, c, g, or t
  misc_feature (913)..(914): n is a, c, g, or t
  misc_feature (916)..(917): n is a, c, g, or t
  misc_feature (927)..(927): n is a, c, g, or t
  misc_feature (930)..(930): n is a, c, g, or t
  misc_feature (933)..(933): n is a, c, g, or t
  misc_feature (939)..(939): n is a, c, g, or t
  misc_feature (942)..(942): n is a, c, g, or t
  misc_feature (944)..(944): n is a, c, g, or t
  misc_feature (947)..(949): n is a, c, g, or t
  misc_feature (952)..(952): n is a, c, g, or t
  misc_feature (955)..(955): n is a, c, g, or t
  misc_feature (961)..(961): n is a, c, g, or t
  misc_feature (966)..(966): n is a, c, g, or t
  misc_feature (968)..(969): n is a, c, g, or t
  misc_feature (978)..(978): n is a, c, g, or t
  misc_feature (982)..(982): n is a, c, g, or t
  misc_feature (1006)..(1006): n is a, c, g, or t
  misc_feature (1022)..(1022): n is a, c, g, or t
  misc_feature (1031)..(1032): n is a, c, g, or t
  misc_feature (1044)..(1044): n is a, c, g, or t
  misc_feature (1048)..(1050): n is a, c, g, or t
  misc_feature (1056)..(1058): n is a, c, g, or t
  misc_feature (1062)..(1062): n is a, c, g, or t
  misc_feature (1064)..(1064): n is a, c, g, or t
  misc_feature (1068)..(1068): n is a, c, g, or t
  misc_feature (1071)..(1071): n is a, c, g, or t
  misc_feature (1073)..(1075): n is a, c, g, or t
  misc_feature (1080)..(1080): n is a, c, g, or t
  misc_feature (1082)..(1082): n is a, c, g, or t
  misc_feature (1088)..(1088): n is a, c, g, or t
  misc_feature (1094)..(1094): n is a, c, g, or t
  misc_feature (1104)..(1104): n is a, c, g, or t
  misc_feature (1109)..(1109): n is a, c, g, or t
  misc_feature (1112)..(1112): n is a, c, g, or t
  misc_feature (1124)..(1124): n is a, c, g, or t
  misc_feature (1126)..(1126): n is a, c, g, or t
  misc_feature (1130)..(1130): n is a, c, g, or t
  misc_feature (1132)..(1132): n is a, c, g, or t
  misc_feature (1134)..(1135): n is a, c, g, or t
  misc_feature (1140)..(1140): n is a, c, g, or t
  misc_feature (1146)..(1146): n is a, c, g, or t
  misc_feature (1148)..(1148): n is a, c, g, or t
  misc_feature (1152)..(1152): n is a, c, g, or t
  misc_feature (1158)..(1158): n is a, c, g, or t
  misc_feature (1163)..(1163): n is a, c, g, or t
  misc_feature (1165)..(1165): n is a, c, g, or t
  misc_feature (1170)..(1170): n is a, c, g, or t
  misc_feature (1175)..(1175): n is a, c, g, or t
  misc_feature (1188)..(1188): n is a, c, g, or t
  misc_feature (1198)..(1199): n is a, c, g, or t
  misc_feature (1202)..(1203): n is a, c, g, or t
  misc_feature (1205)..(1205): n is a, c, g, or t
  misc_feature (1208)..(1209): n is a, c, g, or t
  misc_feature (1222)..(1222): n is a, c, g, or t
  misc_feature (1235)..(1235): n is a, c, g, or t
  misc_feature (1244)..(1244): n is a, c, g, or t
  misc_feature (1247)..(1247): n is a, c, g, or t
  misc_feature (1250)..(1250): n is a, c, g, or t
  misc_feature (1253)..(1254): n is a, c, g, or t
  misc_feature (1263)..(1263): n is a, c, g, or t
  misc_feature (1268)..(1268): n is a, c, g, or t
atagagaaattactatgagaggatcgcatcaccatcaccatcacggatcctatttaggtgacactatagaatcgtcgacccacgcgtccgcccacgcgtccggcagaatggctcccgcaaagaagggtggcgagaagaaaaagggccgttctgccatcaacgaagtggtaacccgagaatacaccatcaacattcacaagcgcatccatggagtgggcttcaagaagcgtgcacctcgggcactcaaagagattcggaaatttgccatgaaggagatgggaactccagatgtgcgcattgacaccaggctcaacaaagctgtctgggccaaaggaataaggaatgtgccataccgaatccgtgtgcggctgtccagaaaacgtaatgaggatgaagattcaccaaataagctatatactttggttacctatgtacctgttaccactttcaaaaatctacagacagtcaatgtggatgagaactaatcgctgatcgtcagatcaaataaagttataaaattgcaaaaaaaaaaaaaaaaaanaaaaaaaaaaaaaaaaaaaaaaaaaaaaaaaaaaaaaaaaaaanaaaaaaataaanaanaanaaaaaaanaaaanaaanggggggggccnccccctatngggggccgnntnaacnttanttannnnanntnggnccccngntnnananancccngtanggncccccaaanncccctcgggnttttttcaaaancntcgtttgccccnggngnttttttttttnggggaaaaanccnnncttnntttggggngnatttttncgggngttaagggagnntnnaattgggaaaaaaaaaaaccccggggtnttncccccgttnnatntntccccccngggnntncntaaaaaanatttttnngggggtttttcanncnngttgccccanggnccnttaaanccnanccnnnccnctngggaantttcncnnccttttttnaaancccgttaaaaaaaaaaaaaccccnatgttttttccggccntttttttcnntttcttggcccncctnnnaaaggnnncctncngaanttntnnnggacntnaaaaancgggancccggggaanatggnaanaggtttcccccntntttncncnnttttnccggananaaanggaaanttttntnccccntgggngggaaaccccaanatttccgggnnttnncncanntttttccaaaagnggggggtttgggnaaaaaccgnctnttnccnnagggttttnggaantg

SEQ ID NO: 286 - DNA, 1349 bp, Homo Sapiens
  misc_feature (820)..(820): n is a, c, g, or t
  misc_feature (903)..(903): n is a, c, g, or t
  misc_feature (918)..(918): n is a, c, g, or t
  misc_feature (927)..(927): n is a, c, g, or t
  misc_feature (943)..(943): n is a, c, g, or t
  misc_feature (968)..(968): n is a, c, g, or t
  misc_feature (970)..(970): n is a, c, g, or t
  misc_feature (974)..(974): n is a, c, g, or t
  misc_feature (981)..(981): n is a, c, g, or t
  misc_feature (983)..(983): n is a, c, g, or t
  misc_feature (1001)..(1001): n is a, c, g, or t
  misc_feature (1014)..(1014): n is a, c, g, or t
  misc_feature (1029)..(1029): n is a, c, g, or t
  misc_feature (1031)..(1031): n is a, c, g, or t
  misc_feature (1034)..(1034): n is a, c, g, or t
  misc_feature (1043)..(1043): n is a, c, g, or t
  misc_feature (1048)..(1048): n is a, c, g, or t
  misc_feature (1053)..(1053): n is a, c, g, or t
  misc_feature (1064)..(1065): n is a, c, g, or t
  misc_feature (1076)..(1076): n is a, c, g, or t
  misc_feature (1081)..(1081): n is a, c, g, or t
  misc_feature (1086)..(1088): n is a, c, g, or t
  misc_feature (1090)..(1090): n is a, c, g, or t
  misc_feature (1092)..(1092): n is a, c, g, or t
  misc_feature (1095)..(1096): n is a, c, g, or t
  misc_feature (1102)..(1103): n is a, c, g, or t
  misc_feature (1107)..(1108): n is a, c, g, or t
  misc_feature (1111)..(1111): n is a, c, g, or t
  misc_feature (1115)..(1115): n is a, c, g, or t
  misc_feature (1124)..(1124): n is a, c, g, or t
  misc_feature (1132)..(1132): n is a, c, g, or t
  misc_feature (1136)..(1136): n is a, c, g, or t
  misc_feature (1140)..(1140): n is a, c, g, or t
  misc_feature (1148)..(1148): n is a, c, g, or t
  misc_feature (1156)..(1156): n is a, c, g, or t
  misc_feature (1160)..(1162): n is a, c, g, or t
  misc_feature (1165)..(1168): n is a, c, g, or t
  misc_feature (1182)..(1182): n is a, c, g, or t
  misc_feature (1185)..(1185): n is a, c, g, or t
  misc_feature (1189)..(1194): n is a, c, g, or t
  misc_feature (1196)..(1201): n is a, c, g, or t
  misc_feature (1204)..(1205): n is a, c, g, or t
  misc_feature (1212)..(1212): n is a, c, g, or t
  misc_feature (1216)..(1216): n is a, c, g, or t
  misc_feature (1218)..(1218): n is a, c, g, or t
  misc_feature (1221)..(1224): n is a, c, g, or t
  misc_feature (1226)..(1226): n is a, c, g, or t
  misc_feature (1230)..(1230): n is a, c, g, or t
  misc_feature (1232)..(1234): n is a, c, g, or t
  misc_feature (1236)..(1236): n is a, c, g, or t
  misc_feature (1244)..(1244): n is a, c, g, or t
  misc_feature (1246)..(1248): n is a, c, g, or t
  misc_feature (1259)..(1263): n is a, c, g, or t
  misc_feature (1269)..(1269): n is a, c, g, or t
  misc_feature (1271)..(1272): n is a, c, g, or t
  misc_feature (1279)..(1282): n is a, c, g, or t
  misc_feature (1286)..(1286): n is a, c, g, or t
  misc_feature (1291)..(1293): n is a, c, g, or t
  misc_feature (1297)..(1297): n is a, c, g, or t
  misc_feature (1299)..(1301): n is a, c, g, or t
  misc_feature (1304)..(1304): n is a, c, g, or t
  misc_feature (1306)..(1306): n is a, c, g, or t
  misc_feature (1310)..(1315): n is a, c, g, or t
  misc_feature (1321)..(1334): n is a, c, g, or t
  misc_feature (1337)..(1338): n is a, c, g, or t
  misc_feature (1340)..(1340): n is a, c, g, or t
  misc_feature (1344)..(1344): n is a, c, g, or t
  misc_feature (1347)..(1347): n is a, c, g, or t
  misc_feature (1349)..(1349): n is a, c, g, or t
tagagagattactatgagaggatcgcatcaccatcaccatcacggatcctatttaggtgacactatagaatcgtcgacccacgcgtccggacgaggggaggagccgctggctcccagccccgccgcgatgagcctcggccgcctttgccgcctactgaagccggcgctgctctgtggggctctggccgcgcctggcctggccgggaccatgtgcgcgtcccgggacgactggcgctgtgcgcgctccatgcacgagttttccgccaaggacatcgacgggcacatggttaacctggacaagtaccggggcttcgtgtgcatcgtcaccaacgtggcctcccagtgaggcaagaccgaagtaaactacactcagctcgtcgacctgcacgcccgatacgctgagtgtggtttgcggatcctggccttcccgtgtaaccagttcgggaagcaggagccagggagtaacgaagagatcaaagagttcgccgcgggctacaacgtcaaattcgatatgttcagcaagatctgcgtgaacggggacgacgcccacccgctgtggaagtggatgaagatccaacccaagggcaagggcatcctgggaaatgccatcaagtggaacttcaccaagttcctcatcgacaagaacggctgcgtggtgaagcgctacggacccatggaggagcccctggtgatagagaaggacctgccccactatttctagctccacaagtgtgtggccccgcccgagcccctgcccacgccctcggagccttccaccggcactcatgacggcctgcctgcaaacctgctggtggggcanacccgaaaatccagcgtgcaccccgccggaggaaggtcccatggcctgctgggcttggctcggcgcccccacccctggctacnttgtgggaataaacngacaattancaaaaaaaaaaaaaanggcggccgctccctatagtgagtcnantaancttaatnanctgaacttggactcctgnttgaaaaatccantaatgactcaaaatncntcnggatttttnaaaanctcgnttcccccgggnnttttttttggngaaanccaannnantnggnnaatttnngganntangaantaaaatggnaaaaaaancccngggnaacccccntttaaatncccnnnggnnnnaaaaaaaattttgnggntttnnnnnntnnnnnnggnncaaaaanaaangnttnnnngnaatnannncnttttaaancnnnaaaaaaaaaannnnntttttncnnctttttnnnntttnccccnnnaaangnnnccnantttnnnnnnaaaaannnnnnnnnnnnnnaanntncccnttncn

SEQ ID NO: 287 - DNA, 1388 bp, Homo Sapiens
  misc_feature (791)..(791): n is a, c, g, or t
  misc_feature (798)..(798): n is a, c, g, or t
  misc_feature (826)..(826): n is a, c, g, or t
  misc_feature (838)..(838): n is a, c, g, or t
  misc_feature (856)..(856): n is a, c, g, or t
  misc_feature (894)..(894): n is a, c, g, or t
  misc_feature (953)..(953): n is a, c, g, or t
  misc_feature (970)..(970): n is a, c, g, or t
  misc_feature (984)..(984): n is a, c, g, or t
  misc_feature (988)..(988): n is a, c, g, or t
  misc_feature (1002)..(1002): n is a, c, g, or t
  misc_feature (1030)..(1030): n is a, c, g, or t
  misc_feature (1034)..(1034): n is a, c, g, or t
  misc_feature (1050)..(1050): n is a, c, g, or t
  misc_feature (1053)..(1053): n is a, c, g, or t
  misc_feature (1057)..(1057): n is a, c, g, or t
  misc_feature (1060)..(1060): n is a, c, g, or t
  misc_feature (1064)..(1064): n is a, c, g, or t
  misc_feature (1068)..(1068): n is a, c, g, or t
  misc_feature (1071)..(1071): n is a, c, g, or t
  misc_feature (1073)..(1073): n is a, c, g, or t
  misc_feature (1088)..(1088): n is a, c, g, or t
  misc_feature (1105)..(1105): n is a, c, g, or t
  misc_feature (1123)..(1123): n is a, c, g, or t
  misc_feature (1126)..(1126): n is a, c, g, or t
  misc_feature (1143)..(1143): n is a, c, g, or t
  misc_feature (1150)..(1150): n is a, c, g, or t
  misc_feature (1183)..(1183): n is a, c, g, or t
  misc_feature (1190)..(1190): n is a, c, g, or t
  misc_feature (1200)..(1200): n is a, c, g, or t
  misc_feature (1205)..(1205): n is a, c, g, or t
  misc_feature (1219)..(1219): n is a, c, g, or t
  misc_feature (1222)..(1224): n is a, c, g, or t
  misc_feature (1235)..(1235): n is a, c, g, or t
  misc_feature (1237)..(1237): n is a, c, g, or t
  misc_feature (1246)..(1247): n is a, c, g, or t
  misc_feature (1249)..(1252): n is a, c, g, or t
  misc_feature (1255)..(1255): n is a, c, g, or t
  misc_feature (1263)..(1263): n is a, c, g, or t
  misc_feature (1271)..(1271): n is a, c, g, or t
  misc_feature (1283)..(1283): n is a, c, g, or t
  misc_feature (1291)..(1291): n is a, c, g, or t
  misc_feature (1298)..(1298): n is a, c, g, or t
  misc_feature (1302)..(1302): n is a, c, g, or t
  misc_feature (1304)..(1304): n is a, c, g, or t
  misc_feature (1307)..(1307): n is a, c, g, or t
  misc_feature (1310)..(1311): n is a, c, g, or t
  misc_feature (1318)..(1318): n is a, c, g, or t
  misc_feature (1321)..(1321): n is a, c, g, or t
  misc_feature (1330)..(1330): n is a, c, g, or t
  misc_feature (1334)..(1335): n is a, c, g, or t
  misc_feature (1338)..(1338): n is a, c, g, or t
  misc_feature (1340)..(1340): n is a, c, g, or t
  misc_feature (1344)..(1347): n is a, c, g, or t
  misc_feature (1349)..(1350): n is a, c, g, or t
  misc_feature (1356)..(1358): n is a, c, g, or t
  misc_feature (1361)..(1361): n is a, c, g, or t
  misc_feature (1363)..(1363): n is a, c, g, or t
  misc_feature (1366)..(1366): n is a, c, g, or t
  misc_feature (1375)..(1378): n is a, c, g, or t
  misc_feature (1388)..(1388): n is a, c, g, or t
gagaaattactatgagaggatcgcatcaccatcaccatcacggatcctatttaggtgacactatagaatcgtcgacccacgcgtccgggtagactcaaagaggtgtgaggtcagagcagacatttgagggggcagcatccctttgggacctcggcccctgctcccctttacccactggtggaggcgggaggttgggtgagagttgggtgtatgttttctgccctgtccacctgtgcaccaggccagggacaccttcaacaatgcctgctgtgccagtgtttgtgtgggtcactgaccctgtgtaccagactcacttggtataaaattaaaaaatacagatacttggaaccttccccagaacactaatcctggctgtctagggatggtgcttcctaggtcatgctgataaataccaaagtttgggaacccctgccctgtgcacaccactcctcactcctaggccacagaaagttctagggtgtctgcagggacagattcgtagtttatagtttatcctgaaaacctgggtgcctccgtgggtctacttcaggctgattctgtcatctggatgtgacagtgccaggctctgggagggacaacattggttgagtgcttgccatgtgtaaggcaccatagtagaaaagataatgtggtccctacccacaggaaagtcaccgtctaatagagaactgtctaatagagaatctgcacagtgagcaggtgaacactaaacatcacaacttgaggggtgaaagaccacctgtctatgcccttctctttaaagatcaganaactgangcctggttggagaagtgagccagccaanatcctcctgcanatgggccttggaaggcanatgctatcttttggctgcactaccctgtgaaataaaanaaggttctctaaaataggtgtaaaaaagtccacttttttggaattgggccaacattttncaaaattcttctgtccnatttgcactttaanaatnccccacctggggcncggggggctccccatctgtaaatccccncccntttggaaaaaaaaggnggnaagntcntttnaagnccngnaattaaaagaaaccngggcaaaaaacaaaaanccctccctattttgtttnaanaaaacaaaggaaaatcnaaaaatnctcttcttttccccaaaaggtttaaggcaattnccccaanggaaaggatnaaaanttaaacccccggcnggnnnttttatttttnanggaatcttnnannnngcntttttttntcctcccnttgggaaaaatnccccccanccctttnttananccnccnntattttnccnacccaaaancccnnaanangggnnnngnnggcccnnnccntnaangggcccccnnnnttaccccaan

SEQ ID NO: 288 - DNA, 1243 bp, Homo Sapiens
  misc_feature (723)..(723): n is a, c, g, or t
  misc_feature (737)..(737): n is a, c, g, or t
  misc_feature (762)..(762): n is a, c, g, or t
  misc_feature (770)..(770): n is a, c, g, or t
  misc_feature (776)..(776): n is a, c, g, or t
  misc_feature (817)..(817): n is a, c, g, or t
  misc_feature (819)..(819): n is a, c, g, or t
  misc_feature (834)..(834): n is a, c, g, or t
  misc_feature (847)..(847): n is a, c, g, or t
  misc_feature (854)..(854): n is a, c, g, or t
  misc_feature (859)..(859): n is a, c, g, or t
  misc_feature (865)..(866): n is a, c, g, or t
  misc_feature (878)..(878): n is a, c, g, or t
  misc_feature (897)..(897): n is a, c, g, or t
  misc_feature (904)..(904): n is a, c, g, or t
  misc_feature (910)..(910): n is a, c, g, or t
  misc_feature (914)..(914): n is a, c, g, or t
  misc_feature (916)..(916): n is a, c, g, or t
  misc_feature (967)..(967): n is a, c, g, or t
  misc_feature (976)..(976): n is a, c, g, or t
  misc_feature (984)..(985): n is a, c, g, or t
  misc_feature (989)..(989): n is a, c, g, or t
  misc_feature (999)..(999): n is a, c, g, or t
  misc_feature (1006)..(1006): n is a, c, g, or t
  misc_feature (1021)..(1021): n is a, c, g, or t
  misc_feature (1028)..(1028): n is a, c, g, or t
  misc_feature (1036)..(1036): n is a, c, g, or t
  misc_feature (1038)..(1038): n is a, c, g, or t
  misc_feature (1042)..(1042): n is a, c, g, or t
  misc_feature (1045)..(1045): n is a, c, g, or t
  misc_feature (1055)..(1055): n is a, c, g, or t
  misc_feature (1066)..(1066): n is a, c, g, or t
  misc_feature (1075)..(1075): n is a, c, g, or t
  misc_feature (1082)..(1082): n is a, c, g, or t
  misc_feature (1087)..(1087): n is a, c, g, or t
  misc_feature (1095)..(1095): n is a, c, g, or t
  misc_feature (1101)..(1101): n is a, c, g, or t
  misc_feature (1105)..(1105): n is a, c, g, or t
  misc_feature (1112)..(1112): n is a, c, g, or t
  misc_feature (1117)..(1118): n is a, c, g, or t
  misc_feature (1127)..(1127): n is a, c, g, or t
  misc_feature (1130)..(1130): n is a, c, g, or t
  misc_feature (1139)..(1139): n is a, c, g, or t
  misc_feature (1141)..(1141): n is a, c, g, or t
  misc_feature (1144)..(1144): n is a, c, g, or t
  misc_feature (1155)..(1156): n is a, c, g, or t
  misc_feature (1159)..(1159): n is a, c, g, or t
  misc_feature (1182)..(1182): n is a, c, g, or t
  misc_feature (1192)..(1192): n is a, c, g, or t
  misc_feature (1200)..(1200): n is a, c, g, or t
  misc_feature (1202)..(1202): n is a, c, g, or t
  misc_feature (1208)..(1208): n is a, c, g, or t
  misc_feature (1216)..(1216): n is a, c, g, or t
  misc_feature (1219)..(1219): n is a, c, g, or t
  misc_feature (1225)..(1225): n is a, c, g, or t
  misc_feature (1230)..(1230): n is a, c, g, or t
  misc_feature (1232)..(1234): n is a, c, g, or t
tagagaaattactatgagaggatcgcatcaccatcaccatcacggatcctatttaggtgacactatagaatcgtcgacccacgcgttccgcggagaaagtgaaaggtgaggcacggccctgcagattttccagcggatcccccggtggcctcatgtcgcgcagtggaaccgatcctcagcaacgccagcaggcgtcagaggcggacgccgcagcagcaaccttccgggcaaacgaccatcagcatatccgctacaacccgctgcaggatgagtgggtgctggtgtcagctcaccgcatgaagcggccctggcagggtcaagtggagccccagcttctgaagacagtgccccgccatgaccctctcaaccctctgtgtcctggggccatccgagccaacggagagatctttgaaaacaaaggtgccatgatgggctgttctaacccccacccccactgccaggtatgggccagcagtttcctgccagatattgcccagcgtgaggagcgatctcagcaggcctataagagtcagcatggagagcccctgctaatggagtacagccgccaggagctactcaggaaggaacgtctggtcctaaccagtgagcactggttagtactggtccccttctgggcaacatggccctaccagacactgctgctgccccgtcggcatgtgcggcggctacctgagctgacccctgctgagcgtgatgatctancctccatcatgaanaagctcttgaccaagtatgacaacntctttganacgtcntttccctactccatgggctggcatggggctcccacaggatnanaggctggggccaaantggaaccattggnaactgcncgctnattaannaccctccgctcntgggttctgccattgtccngaaattncatggnttgntnaaaaaatgcttgctcaggctcaaaaggaacctccccccctgaacaggttgnaaaaaaaanaaagggcnntttntgaaggtttntttaacnccctggggaaaaaangaaaggnaaaaaaanancttnccntgaccccccnaaccaggggcnttttaattnttttttnttttnaaagtttngtaaanaaanaaaaagnccttnnattctgccngantttggaaananatntaaaaaattgnnctncaaaaaaaaaaaaaaaaaagggngccccccctnagggggcnanaatttntaggaaanggnccgggngaaancnnnaagccccaa

SEQ ID NO: 289 - DNA, 1229 bp, Homo Sapiens
  misc_feature (1)..(1): n is a, c, g, or t
  misc_feature (3)..(3): n is a, c, g, or t
  misc_feature (902)..(902): n is a, c, g, or t
  misc_feature (920)..(920): n is a, c, g, or t
  misc_feature (961)..(961): n is a, c, g, or t
  misc_feature (978)..(979): n is a, c, g, or t
  misc_feature (1004)..(1004): n is a, c, g, or t
  misc_feature (1024)..(1024): n is a, c, g, or t
  misc_feature (1032)..(1032): n is a, c, g, or t
  misc_feature (1036)..(1036): n is a, c, g, or t
  misc_feature (1043)..(1043): n is a, c, g, or t
  misc_feature (1063)..(1063): n is a, c, g, or t
  misc_feature (1068)..(1068): n is a, c, g, or t
  misc_feature (1077)..(1078): n is a, c, g, or t
  misc_feature (1080)..(1080): n is a, c, g, or t
  misc_feature (1089)..(1089): n is a, c, g, or t
  misc_feature (1091)..(1091): n is a, c, g, or t
  misc_feature (1111)..(1111): n is a, c, g, or t
  misc_feature (1113)..(1113): n is a, c, g, or t
  misc_feature (1133)..(1133): n is a, c, g, or t
  misc_feature (1143)..(1144): n is a, c, g, or t
  misc_feature (1146)..(1146): n is a, c, g, or t
  misc_feature (1164)..(1164): n is a, c, g, or t
  misc_feature (1172)..(1172): n is a, c, g, or t
  misc_feature (1174)..(1174): n is a, c, g, or t
  misc_feature (1176)..(1176): n is a, c, g, or t
  misc_feature (1183)..(1183): n is a, c, g, or t
  misc_feature (1185)..(1185): n is a, c, g, or t
  misc_feature (1190)..(1190): n is a, c, g, or t
  misc_feature (1193)..(1193): n is a, c, g, or t
  misc_feature (1199)..(1199): n is a, c, g, or t
  misc_feature (1216)..(1216): n is a, c, g, or t
  misc_feature (1222)..(1222): n is a, c, g, or t
  misc_feature (1227)..(1227): n is a, c, g, or t
nantagagaaattactatgagaggatcgcatcaccatcaccatcacggatcctatttaggtgacactatagaatcgtcgacccacgcgtccggcgcgccggagcccaaattccaagtggaaactgcaggcgcacgagggaggaacgcgtggagcatgaaaaggcagggggcctcctctgagcgaaaacgagcgcggataccgtccgggaaggccggagcagcaaatggatttctcatggaagtttgtgttgattcagtggaatcagctgtgaatgcagaaagaggaggtgctgatcggattgaattatgttctggtttatcagaggggggaactacacccagcatgggtgtccttcaagtagtgaagcagagtgttcagatcccagtttttgtgatgattcggccacggggaggtgattttttgtattcagatcgtgaaattgaggtgatgaaggctgacattcgtcttgccaagctttatggtgctgatggtttggtttttggggcattgactgaagatggacacattgacaaagagctgtgtatgtcccttatggctatttgccgccctctgccagtcactttccaccgagcctttgacatggttcatgatccaatggcagctctggagaccctcttaaccttgggatttgaacgcgtgttgaccagtggatgtgacagttcagcattagaagggctacccctaataaagcgactcattgagcaggcaaaaggcaggattgtggtaatgccaggaggtggtataacagacagaaatctacaaaggatccttgagggttcaggtgctacagaattccactgttctgctcggtctactagagactcgggaatgaagtttcgaaattcatctgttgccatgggagcctcactttcttgctcanaatattccctaaaggtancagatgtgaccaaagtaaggactttgaatgctatcgcaaanaacatcctggtgtaccnnaaccctctgaaaaacatggatatcncaggatgaaggtagaacttnatctgcanttcnctatganccagctttaaccttcttccntggcnagaaagtcnnanctttgtttnangtttccatggccctggaaangngccccaaaaaaaaaaaattnaaaaaaaatnngnccttccttgctaaccctncaggatgncncngggtaangngggcnggncttctnccaaaaaaaacttaacngtttcnggganta

SEQ ID NO: 290 - DNA, 1342 bp, Homo Sapiens
  misc_feature (709)..(709): n is a, c, g, or t
  misc_feature (714)..(714): n is a, c, g, or t
  misc_feature (717)..(717): n is a, c, g, or t
  misc_feature (783)..(783): n is a, c, g, or t
  misc_feature (795)..(795): n is a, c, g, or t
  misc_feature (812)..(812): n is a, c, g, or t
  misc_feature (877)..(877): n is a, c, g, or t
  misc_feature (881)..(881): n is a, c, g, or t
  misc_feature (887)..(887): n is a, c, g, or t
  misc_feature (941)..(941): n is a, c, g, or t
  misc_feature (946)..(946): n is a, c, g, or t
  misc_feature (953)..(953): n is a, c, g, or t
  misc_feature (957)..(957): n is a, c, g, or t
  misc_feature (979)..(979): n is a, c, g, or t
  misc_feature (990)..(990): n is a, c, g, or t
  misc_feature (993)..(993): n is a, c, g, or t
  misc_feature (1000)..(1000): n is a, c, g, or t
  misc_feature (1002)..(1002): n is a, c, g, or t
  misc_feature (1006)..(1006): n is a, c, g, or t
  misc_feature (1012)..(1012): n is a, c, g, or t
  misc_feature (1014)..(1014): n is a, c, g, or t
  misc_feature (1022)..(1022): n is a, c, g, or t
  misc_feature (1035)..(1037): n is a, c, g, or t
  misc_feature (1041)..(1041): n is a, c, g, or t
  misc_feature (1043)..(1044): n is a, c, g, or t
  misc_feature (1050)..(1050): n is a, c, g, or t
  misc_feature (1053)..(1054): n is a, c, g, or t
  misc_feature (1063)..(1063): n is a, c, g, or t
  misc_feature (1068)..(1068): n is a, c, g, or t
  misc_feature (1075)..(1076): n is a, c, g, or t
  misc_feature (1084)..(1125): n is a, c, g, or t
  misc_feature (1131)..(1131): n is a, c, g, or t
  misc_feature (1139)..(1139): n is a, c, g, or t
  misc_feature (1144)..(1147): n is a, c, g, or t
  misc_feature (1149)..(1149): n is a, c, g, or t
  misc_feature (1155)..(1156): n is a, c, g, or t
  misc_feature (1161)..(1161): n is a, c, g, or t
  misc_feature (1164)..(1167): n is a, c, g, or t
  misc_feature (1170)..(1170): n is a, c, g, or t
  misc_feature (1176)..(1176): n is a, c, g, or t
  misc_feature (1180)..(1183): n is a, c, g, or t
  misc_feature (1191)..(1192): n is a, c, g, or t
  misc_feature (1195)..(1196): n is a, c, g, or t
  misc_feature (1201)..(1201): n is a, c, g, or t
  misc_feature (1209)..(1210): n is a, c, g, or t
  misc_feature (1214)..(1214): n is a, c, g, or t
  misc_feature (1224)..(1228): n is a, c, g, or t
  misc_feature (1230)..(1231): n is a, c, g, or t
  misc_feature (1236)..(1236): n is a, c, g, or t
  misc_feature (1240)..(1240): n is a, c, g, or t
  misc_feature (1249)..(1249): n is a, c, g, or t
  misc_feature (1252)..(1252): n is a, c, g, or t
  misc_feature (1256)..(1258): n is a, c, g, or t
  misc_feature (1260)..(1264): n is a, c, g, or t
  misc_feature (1268)..(1268): n is a, c, g, or t
  misc_feature (1271)..(1271): n is a, c, g, or t
  misc_feature (1276)..(1288): n is a, c, g, or t
  misc_feature (1290)..(1290): n is a, c, g, or t
  misc_feature (1292)..(1292): n is a, c, g, or t
  misc_feature (1299)..(1301): n is a, c, g, or t
  misc_feature (1304)..(1305): n is a, c, g, or t
  misc_feature (1307)..(1308): n is a, c, g, or t
  misc_feature (1310)..(1315): n is a, c, g, or t
  misc_feature (1320)..(1321): n is a, c, g, or t
  misc_feature (1324)..(1327): n is a, c, g, or t
  misc_feature (1332)..(1332): n is a, c, g, or t
  misc_feature (1336)..(1339): n is a, c, g, or t
  misc_feature (1342)..(1342): n is a, c, g, or t
agaaattactatgagaggatcgcatcaccatcaccatcacggatcctatttaggtgacactatagaatcgtcgacccacgcgtccggccaccccctggcgagcggagccacacccagcgccttgcagtctaaggagagcccatgcctttggacatgctgttccttctgcctggaatttccttgtccgcctggtgaactcctcgttctgcaagactccgctcaaaacagcaccttcgagaagactgccctgccccttccctgccttgccccatgtccccctcccttgggtccccagagccacgcacatccagccctgcttcccacacacggggccgtgcgtgcctttcttcaccactgagctccttcaagggcagggactgtctttatctttgcatcccccgctgcaccctgtgcctgcccactgggcactcggtggatggtgtgcgggcggatgggtgagtgagcggacaaaggtgggtctgaggctggccctgtgtggtgtgaggtttggtggtcaggacctgggcgggtggtcctgagtgctggcccgtgtgcttgaaagggtgtggtgctattgggtcctactgtgttccccaggtcccgcagcccccggaagccaatagactccctcagggactctcggtccctcagctactcgcctgtggagcgtcgccgtccctcgccccagccctcaccacgggaccagcanagcancancagtgagcggggttcccggagaggccagcgtggggacagccgctcccccagccacaagcgcagganggagaaacctanccctcggcccatgaaanaccgctcctccaggtctccataaattgtctttggggggattccaccaacacccaatgctctgganccanaaggantgtcccttcttccccaacaaaaccgtgggaagggtccttgtctgctctcctttnaaacnttggcancccnttggaaggaagggctccctttnccctccccccnaantttttangntttnttaaangnattttggnttttttaaaaatnnngtanannaaaaanaanntttttttgntcaanaaaaatnnaaaatgcnnnnnnnnnnnnnnnnnnnnnnnnnnnnnnnnnnnnnnnnnngggggncccccccnaaagnnnncnaaaaannttaantannnnaanttggancccnnnnaaaaaccnnaannacccnaaaccccnnggantttttaaaannnnntnngcccngggnttttttttnggnaaannnannnnntggnaanttttnnnnnnnnnnnnnangnaaaaaannnggnnanncnnnnnnaaccnnggnnnnaaaantttnnnnttn

SEQ ID NO: 291 - DNA, 1463 bp, Homo Sapiens
  misc_feature (232)..(232): n is a, c, g, or t
  misc_feature (475)..(475): n is a, c, g, or t
  misc_feature (553)..(553): n is a, c, g, or t
  misc_feature (596)..(596): n is a, c, g, or t
  misc_feature (608)..(608): n is a, c, g, or t
  misc_feature (635)..(635): n is a, c, g, or t
  misc_feature (649)..(649): n is a, c, g, or t
  misc_feature (657)..(657): n is a, c, g, or t
  misc_feature (715)..(715): n is a, c, g, or t
  misc_feature (730)..(730): n is a, c, g, or t
  misc_feature (735)..(735): n is a, c, g, or t
  misc_feature (747)..(747): n is a, c, g, or t
  misc_feature (752)..(752): n is a, c, g, or t
  misc_feature (765)..(766): n is a, c, g, or t
  misc_feature (779)..(779): n is a, c, g, or t
  misc_feature (787)..(788): n is a, c, g, or t
  misc_feature (827)..(828): n is a, c, g, or t
  misc_feature (843)..(843): n is a, c, g, or t
  misc_feature (845)..(845): n is a, c, g, or t
  misc_feature (861)..(861): n is a, c, g, or t
  misc_feature (882)..(882): n is a, c, g, or t
  misc_feature (886)..(886): n is a, c, g, or t
  misc_feature (889)..(889): n is a, c, g, or t
  misc_feature (899)..(900): n is a, c, g, or t
  misc_feature (908)..(909): n is a, c, g, or t
  misc_feature (911)..(913): n is a, c, g, or t
  misc_feature (929)..(929): n is a, c, g, or t
  misc_feature (933)..(933): n is a, c, g, or t
  misc_feature (942)..(942): n is a, c, g, or t
  misc_feature (948)..(948): n is a, c, g, or t
  misc_feature (956)..(957): n is a, c, g, or t
  misc_feature (970)..(970): n is a, c, g, or t
  misc_feature (976)..(976): n is a, c, g, or t
  misc_feature (985)..(986): n is a, c, g, or t
  misc_feature (991)..(991): n is a, c, g, or t
  misc_feature (1001)..(1001): n is a, c, g, or t
  misc_feature (1006)..(1006): n is a, c, g, or t
  misc_feature (1008)..(1008): n is a, c, g, or t
  misc_feature (1016)..(1016): n is a, c, g, or t
  misc_feature (1024)..(1024): n is a, c, g, or t
  misc_feature (1032)..(1032): n is a, c, g, or t
  misc_feature (1041)..(1042): n is a, c, g, or t
  misc_feature (1049)..(1050): n is a, c, g, or t
  misc_feature (1052)..(1052): n is a, c, g, or t
  misc_feature (1054)..(1054): n is a, c, g, or t
  misc_feature (1065)..(1065): n is a, c, g, or t
  misc_feature (1067)..(1067): n is a, c, g, or t
  misc_feature (1075)..(1075): n is a, c, g, or t
  misc_feature (1078)..(1078): n is a, c, g, or t
  misc_feature (1090)..(1090): n is a, c, g, or t
  misc_feature (1094)..(1094): n is a, c, g, or t
  misc_feature (1104)..(1105): n is a, c, g, or t
  misc_feature (1116)..(1117): n is a, c, g, or t
  misc_feature (1129)..(1130): n is a, c, g, or t
  misc_feature (1138)..(1138): n is a, c, g, or t
  misc_feature (1141)..(1142): n is a, c, g, or t
  misc_feature (1146)..(1147): n is a, c, g, or t
  misc_feature (1153)..(1153): n is a, c, g, or t
  misc_feature (1158)..(1158): n is a, c, g, or t
  misc_feature (1167)..(1167): n is a, c, g, or t
  misc_feature (1169)..(1169): n is a, c, g, or t
  misc_feature (1171)..(1171): n is a, c, g, or t
  misc_feature (1173)..(1173): n is a, c, g, or t
  misc_feature (1175)..(1175): n is a, c, g, or t
  misc_feature (1177)..(1177): n is a, c, g, or t
  misc_feature (1179)..(1179): n is a, c, g, or t
  misc_feature (1186)..(1186): n is a, c, g, or t
  misc_feature (1188)..(1188): n is a, c, g, or t
  misc_feature (1198)..(1198): n is a, c, g, or t
  misc_feature (1207)..(1207): n is a, c, g, or t
  misc_feature (1214)..(1214): n is a, c, g, or t
  misc_feature (1227)..(1228): n is a, c, g, or t
  misc_feature (1232)..(1232): n is a, c, g, or t
  misc_feature (1236)..(1236): n is a, c, g, or t
  misc_feature (1246)..(1246): n is a, c, g, or t
  misc_feature (1249)..(1250): n is a, c, g, or t
  misc_feature (1254)..(1256): n is a, c, g, or t
  misc_feature (1260)..(1261): n is a, c, g, or t
  misc_feature (1263)..(1263): n is a, c, g, or t
  misc_feature (1269)..(1269): n is a, c, g, or t
  misc_feature (1273)..(1273): n is a, c, g, or t
  misc_feature (1276)..(1276): n is a, c, g, or t
  misc_feature (1284)..(1284): n is a, c, g, or t
  misc_feature (1289)..(1293): n is a, c, g, or t
  misc_feature (1296)..(1297): n is a, c, g, or t
  misc_feature (1299)..(1299): n is a, c, g, or t
  misc_feature (1302)..(1303): n is a, c, g, or t
  misc_feature (1305)..(1305): n is a, c, g, or t
  misc_feature (1308)..(1308): n is a, c, g, or t
  misc_feature (1328)..(1329): n is a, c, g, or t
  misc_feature (1336)..(1336): n is a, c, g, or t
  misc_feature (1347)..(1347): n is a, c, g, or t
  misc_feature (1360)..(1360): n is a, c, g, or t
  misc_feature (1365)..(1365): n is a, c, g, or t
  misc_feature (1371)..(1372): n is a, c, g, or t
  misc_feature (1379)..(1380): n is a, c, g, or t
  misc_feature (1385)..(1385): n is a, c, g, or t
  misc_feature (1395)..(1395): n is a, c, g, or t
  misc_feature (1397)..(1397): n is a, c, g, or t
  misc_feature (1400)..(1400): n is a, c, g, or t
  misc_feature (1406)..(1406): n is a, c, g, or t
  misc_feature (1413)..(1413): n is a, c, g, or t
  misc_feature (1416)..(1416): n is a, c, g, or t
  misc_feature (1423)..(1423): n is a, c, g, or t
  misc_feature (1430)..(1430): n is a, c, g, or t
  misc_feature (1441)..(1441): n is a, c, g, or t
  misc_feature (1444)..(1445): n is a, c, g, or t
  misc_feature (1447)..(1447): n is a, c, g, or t
  misc_feature (1453)..(1454): n is a, c, g, or t
  misc_feature (1463)..(1463): n is a, c, g, or t
gaatagagagattactatgagaggatcgcatcaccatcaccatcacggatcctatttaggtgacactatagaatcgtcgacccacgcgtccgggtttggttgtgagatcgagaataacagaagcagcggagcattctggaaatattactatgatggaaaggactacattgaattcaacaaagaaatcccagcctgggtccccttcgacccagcagcccagataaccaagcanaagtgggaggcagaaccagtctacgtgcagcgggccaaggcttacctggaggaggagtgccctgcgactctgcggaaatacctgaaatacagcaaaaatatcctggaccggcaagatcctccctctgtggtggtcaccagccaccaggccccaggagaaaagaagaaactgaagtgcctggcctacgacttctacccagggaaaattgatgtgcactggactcgggccggcgaggtgcaggancctgagttacggggagatgttcttcacaatggaaatggcacttaccagtcctgggtggtggtggcagtgcccccgcangacacagccccctactcctgccacgtgcagcacagcagcctgncccagcccctcntggtgccctgggaggccagctaggaancaagggttggaggnaatgtggnatctcaaacccagtaagctgcccttcctgcctgatgtgggagctgaaccacagaaatncacatgtcaatgganccacnaggccctgaagnagcantgtgggggggacnnaacaggaggttgnatttggannaccgaaagactgggatgcctgtcttgaagtataacttgnnacccaaaaaaaatcntntcacccttgagccccncccccaccccccttggtctantctngtnagaagctaannaaaataanncnnnccctcctttccctaancaanaaaaatgantaatanactaaaannttattttctactnagggcnggccccccnnccatnaaggagtccncaatnanatcttaantcaccttnatctttgncaccctgtnnaaaaaanncncnaaattgactcncnaacctccnttncgaattgttttnaaanactctcgttnngccccggcgtnnatttttttttgnngaaaaacnccnnttanncttggncaaantttttcganantnananancntaatatnanataaaaatcnccggttaanacccccntttaatttctccnngtgntccncaaaaaaatnttnntatnnntttnncntttcgntcanggncccatatngccannnnnctnncntgnnanttnccctcttttagaccctaaannaatatcncaagttttttntcgcccttttcanttctncccacnnataatcnnccccnatttctatgnanatnaaaacngaatcantgnaccaaantatcctntcttacctctntannanaataanntcttctccn

SEQ ID NO: 292 - DNA, 256 bp, Homo Sapiens
gagaaattaactatgagaggatcgcatcaccatcaccatcacggatcctatttaggtgacactatagaatcgtcgacccacgcgtccggcgggagaaagaggagaatcgcccaagcggcctcggaagtcccagggagtggaggcccccgccgtggagccgtgtggtgtatgtgtggtaacaccatgtctgtgcccctgctcaccgatgctgccaccgtgtctggagctgagcgggaaacggccgcggttatttttt

SEQ ID NO: 293 - DNA, 1351 bp, Homo Sapiens
  misc_feature (897)..(897): n is a, c, g, or t
  misc_feature (900)..(900): n is a, c, g, or t
  misc_feature (914)..(914): n is a, c, g, or t
  misc_feature (929)..(929): n is a, c, g, or t
  misc_feature (944)..(944): n is a, c, g, or t
  misc_feature (948)..(948): n is a, c, g, or t
  misc_feature (965)..(965): n is a, c, g, or t
  misc_feature (973)..(973): n is a, c, g, or t
  misc_feature (977)..(977): n is a, c, g, or t
  misc_feature (982)..(982): n is a, c, g, or t
  misc_feature (985)..(985): n is a, c, g, or t
  misc_feature (987)..(987): n is a, c, g, or t
  misc_feature (1014)..(1015): n is a, c, g, or t
  misc_feature (1027)..(1027): n is a, c, g, or t
  misc_feature (1032)..(1032): n is a, c, g, or t
  misc_feature (1035)..(1035): n is a, c, g, or t
  misc_feature (1045)..(1045): n is a, c, g, or t
  misc_feature (1049)..(1049): n is a, c, g, or t
  misc_feature (1056)..(1056): n is a, c, g, or t
  misc_feature (1066)..(1066): n is a, c, g, or t
  misc_feature (1082)..(1082): n is a, c, g, or t
  misc_feature (1091)..(1091): n is a, c, g, or t
  misc_feature (1103)..(1104): n is a, c, g, or t
  misc_feature (1107)..(1107): n is a, c, g, or t
  misc_feature (1109)..(1109): n is a, c, g, or t
  misc_feature (1113)..(1113): n is a, c, g, or t
  misc_feature (1128)..(1129): n is a, c, g, or t
  misc_feature (1134)..(1134): n is a, c, g, or t
  misc_feature (1138)..(1140): n is a, c, g, or t
  misc_feature (1145)..(1145): n is a, c, g, or t
  misc_feature (1147)..(1147): n is a, c, g, or t
  misc_feature (1157)..(1160): n is a, c, g, or t
  misc_feature (1170)..(1170): n is a, c, g, or t
  misc_feature (1172)..(1175): n is a, c, g, or t
  misc_feature (1177)..(1178): n is a, c, g, or t
  misc_feature (1182)..(1183): n is a, c, g, or t
  misc_feature (1185)..(1185): n is a, c, g, or t
  misc_feature (1194)..(1196): n is a, c, g, or t
  misc_feature (1203)..(1203): n is a, c, g, or t
  misc_feature (1207)..(1207): n is a, c, g, or t
  misc_feature (1209)..(1210): n is a, c, g, or t
  misc_feature (1216)..(1216): n is a, c, g, or t
  misc_feature (1218)..(1218): n is a, c, g, or t
  misc_feature (1220)..(1224): n is a, c, g, or t
  misc_feature (1231)..(1231): n is a, c, g, or t
  misc_feature (1233)..(1233): n is a, c, g, or t
  misc_feature (1241)..(1242): n is a, c, g, or t
  misc_feature (1245)..(1247): n is a, c, g, or t
  misc_feature (1252)..(1253): n is a, c, g, or t
  misc_feature (1256)..(1256): n is a, c, g, or t
  misc_feature (1265)..(1265): n is a, c, g, or t
  misc_feature (1270)..(1270): n is a, c, g, or t
  misc_feature (1272)..(1272): n is a, c, g, or t
  misc_feature (1277)..(1277): n is a, c, g, or t
  misc_feature (1280)..(1281): n is a, c, g, or t
  misc_feature (1286)..(1286): n is a, c, g, or t
  misc_feature (1289)..(1292): n is a, c, g, or t
  misc_feature (1297)..(1303): n is a, c, g, or t
  misc_feature (1307)..(1309): n is a, c, g, or t
  misc_feature (1313)..(1313): n is a, c, g, or t
  misc_feature (1317)..(1317): n is a, c, g, or t
  misc_feature (1319)..(1320): n is a, c, g, or t
  misc_feature (1323)..(1325): n is a, c, g, or t
  misc_feature (1335)..(1335): n is a, c, g, or t
  misc_feature (1340)..(1340): n is a, c, g, or t
  misc_feature (1345)..(1345): n is a, c, g, or t
  misc_feature (1350)..(1351): n is a, c, g, or t
atagagaaattactatgagaggatcgcatcaccatcaccatcacggatcctatttaggtgacactatagaatcgtcgacccacgcgtccgccttcaggagccctgagcccaacatccatgagacaccccgagttgtgcttcatgagagttggattctctgcccactctttcagggatgtccaaggtccatgttagggggcaggcccccagctccactcactgcacaagcaccctaaatgttggaagcacaaaatggttgtgatttgagcacaatggcagggtcccgcaggcagacttgacaggcccaggcccgggaggatccccccacgttggctctgtccaaagtgagattgggggtgcctgtgtctgggacagggggctgcccttgctcagaccaggccttggctcatggcttgtcctaattctgggactcgtcatcttacttcttgcccttctgtgcccatcttaagactggaggctgagccttgtcaggcccagccacatctttacgccatgggaccaggagtaaagcgctctctaaaccccgcaccccaaatctctaaacgcctgagttcaggctgagtcctagccctagtgagcctgaagagcttggactgattcccagtctcctgggtcaagccccactttgtgctttcgaagcttatgagcgggttccctggatagaaggagtcttccatccccactgcccttgggcctcttcagcatagtcctgtgccagggccctgtcctcactatcagtcagttcagtatttgctttcacgtgagtggcggactcttctgaagcagccagaactctcaaagacagcgcatggagttgccttgcgagatttccaaggaaggaggaaagattaacaggcggagcctggcacacccaanccntttgaggtggtcanagtgccacctttcanccccttgggaaaggnacancgggtggggtctgggantggcctcncccntggantcnancctaaggaaatctctttcacccctcanntgttccagcccntgctnccntgtctggggnatgngtggccnggggcaaaanggcaattttaaagccnaaaaccccnttggggaaaaannaangntggnggggaattttcccannggccngaannnggggnanggaaaaaccnnnnagggggcttncnnnnanntttnngnaaaaaaaannnttttttncccngnnaaactncnannnnnggggggnancccccaannggnnntgggnnggnaaaagaaanccccngnttttnccnnggccnggnnnnttccnnnnnnntttnnngggnaaancnnccnnnaaaaaaaaanttttntcccnggggnn

SEQ ID NO: 294 - DNA, 1200 bp, Homo Sapiens
  misc_feature (5)..(5): n is a, c, g, or t
  misc_feature (12)..(12): n is a, c, g, or t
  misc_feature (109)..(109): n is a, c, g, or t
  misc_feature (114)..(114): n is a, c, g, or t
  misc_feature (143)..(143): n is a, c, g, or t
  misc_feature (213)..(213): n is a, c, g, or t
  misc_feature (311)..(311): n is a, c, g, or t
  misc_feature (337)..(337): n is a, c, g, or t
  misc_feature (405)..(405): n is a, c, g, or t
  misc_feature (457)..(457): n is a, c, g, or t
  misc_feature (466)..(466): n is a, c, g, or t
  misc_feature (493)..(493): n is a, c, g, or t
  misc_feature (629)..(629): n is a, c, g, or t
  misc_feature (658)..(658): n is a, c, g, or t
  misc_feature (666)..(666): n is a, c, g, or t
  misc_feature (668)..(668): n is a, c, g, or t
  misc_feature (670)..(670): n is a, c, g, or t
  misc_feature (674)..(675): n is a, c, g, or t
  misc_feature (678)..(678): n is a, c, g, or t
  misc_feature (684)..(684): n is a, c, g, or t
  misc_feature (690)..(690): n is a, c, g, or t
  misc_feature (699)..(701): n is a, c, g, or t
  misc_feature (704)..(704): n is a, c, g, or t
  misc_feature (710)..(710): n is a, c, g, or t
  misc_feature (716)..(716): n is a, c, g, or t
  misc_feature (719)..(719): n is a, c, g, or t
  misc_feature (725)..(725): n is a, c, g, or t
  misc_feature (727)..(727): n is a, c, g, or t
  misc_feature (729)..(730): n is a, c, g, or t
  misc_feature (738)..(738): n is a, c, g, or t
  misc_feature (741)..(741): n is a, c, g, or t
  misc_feature (751)..(752): n is a, c, g, or t
  misc_feature (758)..(758): n is a, c, g, or t
  misc_feature (760)..(760): n is a, c, g, or t
  misc_feature (771)..(771): n is a, c, g, or t
  misc_feature (773)..(774): n is a, c, g, or t
  misc_feature (776)..(776): n is a, c, g, or t
  misc_feature (778)..(778): n is a, c, g, or t
  misc_feature (784)..(784): n is a, c, g, or t
  misc_feature (804)..(804): n is a, c, g, or t
  misc_feature (806)..(806): n is a, c, g, or t
  misc_feature (810)..(810): n is a, c, g, or t
  misc_feature (833)..(833): n is a, c, g, or t
  misc_feature (835)..(836): n is a, c, g, or t
  misc_feature (841)..(841): n is a, c, g, or t
  misc_feature (844)..(844): n is a, c, g, or t
  misc_feature (846)..(846): n is a, c, g, or t
  misc_feature (848)..(848): n is a, c, g, or t
  misc_feature (850)..(850): n is a, c, g, or t
  misc_feature (853)..(853): n is a, c, g, or t
  misc_feature (857)..(857): n is a, c, g, or t
  misc_feature (859)..(859): n is a, c, g, or t
  misc_feature (868)..(868): n is a, c, g, or t
  misc_feature (873)..(873): n is a, c, g, or t
  misc_feature (876)..(877): n is a, c, g, or t
  misc_feature (882)..(882): n is a, c, g, or t
  misc_feature (885)..(885): n is a, c, g, or t
  misc_feature (889)..(889): n is a, c, g, or t
  misc_feature (892)..(892): n is a, c, g, or t
  misc_feature (904)..(905): n is a, c, g, or t
  misc_feature (908)..(908): n is a, c, g, or t
  misc_feature (919)..(919): n is a, c, g, or t
  misc_feature (927)..(927): n is a, c, g, or t
  misc_feature (929)..(929): n is a, c, g, or t
  misc_feature (931)..(931): n is a, c, g, or t
  misc_feature (938)..(938): n is a, c, g, or t
  misc_feature (941)..(941): n is a, c, g, or t
  misc_feature (948)..(948): n is a, c, g, or t
  misc_feature (951)..(952): n is a, c, g, or t
  misc_feature (958)..(958): n is a, c, g, or t
  misc_feature (960)..(960): n is a, c, g, or t
  misc_feature (963)..(963): n is a, c, g, or t
  misc_feature (965)..(965): n is a, c, g, or t
  misc_feature (967)..(969): n is a, c, g, or t
  misc_feature (975)..(975): n is a, c, g, or t
  misc_feature (979)..(979): n is a, c, g, or t
  misc_feature (981)..(981): n is a, c, g, or t
  misc_feature (983)..(983): n is a, c, g, or t
  misc_feature (987)..(987): n is a, c, g, or t
  misc_feature (998)..(998): n is a, c, g, or t
  misc_feature (1000)..(1000): n is a, c, g, or t
  misc_feature (1010)..(1010): n is a, c, g, or t
  misc_feature (1012)..(1012): n is a, c, g, or t
  misc_feature (1014)..(1014): n is a, c, g, or t
  misc_feature (1016)..(1016): n is a, c, g, or t
  misc_feature (1018)..(1018): n is a, c, g, or t
  misc_feature (1022)..(1024): n is a, c, g, or t
  misc_feature (1027)..(1027): n is a, c, g, or t
  misc_feature (1031)..(1033): n is a, c, g, or t
  misc_feature (1042)..(1043): n is a, c, g, or t
  misc_feature (1049)..(1049): n is a, c, g, or t
  misc_feature (1055)..(1055): n is a, c, g, or t
  misc_feature (1057)..(1057): n is a, c, g, or t
  misc_feature (1060)..(1060): n is a, c, g, or t
  misc_feature (1064)..(1064): n is a, c, g, or t
  misc_feature (1070)..(1071): n is a, c, g, or t
  misc_feature (1074)..(1074): n is a, c, g, or t
  misc_feature (1090)..(1090): n is a, c, g, or t
  misc_feature (1096)..(1096): n is a, c, g, or t
  misc_feature (1100)..(1100): n is a, c, g, or t
  misc_feature (1103)..(1103): n is a, c, g, or t
  misc_feature (1109)..(1109): n is a, c, g, or t
  misc_feature (1118)..(1118): n is a, c, g, or t
  misc_feature (1121)..(1122): n is a, c, g, or t
  misc_feature (1126)..(1127): n is a, c, g, or t
  misc_feature (1129)..(1129): n is a, c, g, or t
  misc_feature (1133)..(1133): n is a, c, g, or t
  misc_feature (1135)..(1136): n is a, c, g, or t
  misc_feature (1142)..(1142): n is a, c, g, or t
  misc_feature (1146)..(1146): n is a, c, g, or t
  misc_feature (1158)..(1158): n is a, c, g, or t
  misc_feature (1160)..(1160): n is a, c, g, or t
  misc_feature (1163)..(1164): n is a, c, g, or t
  misc_feature (1172)..(1172): n is a, c, g, or t
  misc_feature (1174)..(1174): n is a, c, g, or t
  misc_feature (1176)..(1176): n is a, c, g, or t
  misc_feature (1180)..(1180): n is a, c, g, or t
  misc_feature (1191)..(1191): n is a, c, g, or t
  misc_feature (1193)..(1193): n is a, c, g, or t
  misc_feature (1197)..(1197): n is a, c, g, or t
  misc_feature (1200)..(1200): n is a, c, g, or t
gcatnccgcccncgcgtccgcgggagcggagagcggaccccagagagccctgagcagccccaccgccgccgccggcctagttaccatcacaccccgggaggagccgcanctgcngcagccggccccagtcaccatcaccgcanccatgagcagcgaggccgagacccagcagccgcccgccgccccccccgccgcccccgccctcagcgccgncgacaccaagcccggcactacgggcagcggcgcatggagcggtggcccgggcggcctcacatcggcggcgcctgccggcggggacaagaaggtcatcncaacgaaggttttgggaacagtaaantggttcaatgtaaggaacggatatggtttcatcaacaggaatgacaccaaggaagatgtatttgtacnccaagactgccataaatgaagaataaccccaggaagtaccttcgcagtgtangagatgganagactgtggagtttgatgttgttgaangagaaaagggtgcggaggcagcaaaatgttacaggtcctggtggtgttccagttcaaggcaagtaaatatgctgcagaccgtaaccattatagacgctatccacgtcgtaggggtcctctcacgcaaattaccagnaaaattaccacaataatgagagtgggganaaaaaccnangnatcnntanagttgntcccgnaaggccaannnccnaacaangccggnccntatcgnangnngaaggttnccnaccttactanntgcggnanaccctttgggncnncnancccagntattccaaacccttcttgtngnaagnaaaaattgatcgaagggttgctnannaccanggntncngnaanaacnangtttaaccnctganggnnaaatnttnttcnggnaataataaaccnncanttccgcagggntccctccncncnaaaaaanccntataaanacnngcaatngntananannnataaantttngnantaanacccttggttngntccccccttnantntngnaccnnncantttnnnttttcgttnntaaacnctcagnanacntaantcctcnnatngttaaaaagaaatagnacccancccncanataaanttctccccnccnnagtnnanatgncnngtctanaaanccccttaaaatntnttnnttcgtttntncntccncacaaaaaaananttcnccn

SEQ ID NO: 295 - DNA, 843 bp, Homo Sapiens
  misc_feature (1)..(1): n is a, c, g, or t
  misc_feature (791)..(791): n is a, c, g, or t
  misc_feature (794)..(795): n is a, c, g, or t
  misc_feature (797)..(798): n is a, c, g, or t
  misc_feature (802)..(803): n is a, c, g, or t
  misc_feature (805)..(843): n is a, c, g, or t
naatagagaaattactatgagaggatcgcatcaccatcaccatcacggatcctatttaggtgacactatagaatcgtcgacccacgcgatccggtctgaagctgcctcctaagtctgaagtctcatcagacgaagacatccagttccgcctggtgacaagatttgtgaatgaggcagtcatgtgcctgcaagaggggatcttggccacacctgcagagggagacatcggagccgtctttgggcttggcttcccgccttgtctgggagggcctttccgctttgtggatctgtatggcgcccagaagatagtggaccggctcaagaaatatgaagctgcctatggaaaacagttcaccccatgccagctgctagctgaccatgctaacagccctaacaagaagttctaccagtgagcaggcctcatgcctcgctcagtcagtgcactaaccccagctgccggcagtgctggttctccaacagagtggtgtctagatttatcagagtaacgagaagacaaactccggcactgggtttgctccctgattaaagtgccttcagccaagaccatctctccctcctggtgaagtgtgacttcgaattagtttgcacttcctattggaaggtagagcccactgctcattgtataagccccgaggcctagagtggcagccaagagccatctgaagccacctctctgcctgttcctcccaagaggccagggtggccaggggtggtgagggcagttctgcacccagccaaacacataacaataaaaaccaaactctgtgtcngcnnannaaannannnnnnnnnnnnnnnnnnnnnnnnnnnnnnnnnnnnnnn

SEQ ID NO: 296 - DNA, 256 bp, Homo Sapiens
  misc_feature (7)..(7): n is a, c, g, or t
tcttaangaggagaattaactatgagaggatcgcatcaccatcaccatcacggatcctatttaggtgacactatagaatcgtcgacccacgcgtccgccatggagggtgtagaagagaagaagaaggaggttcctgctgtgccagaaacccttaagaaaaagcgaaggaatttcgcagagctgaagatcaagcgcctgagaaagaagtttgcccaaaagatgcttcgaaaggcaaggaggaagcttatctatgaaa

SEQ ID NO: 297 - DNA, 1229 bp, Homo Sapiens
  misc_feature (11)..(11): n is a, c, g, or t
  misc_feature (532)..(532): n is a, c, g, or t
  misc_feature (762)..(762): n is a, c, g, or t
  misc_feature (845)..(845): n is a, c, g, or t
  misc_feature (876)..(876): n is a, c, g, or t
  misc_feature (886)..(886): n is a, c, g, or t
  misc_feature (888)..(888): n is a, c, g, or t
  misc_feature (904)..(904): n is a, c, g, or t
  misc_feature (912)..(912): n is a, c, g, or t
  misc_feature (916)..(916): n is a, c, g, or t
  misc_feature (919)..(919): n is a, c, g, or t
  misc_feature (937)..(937): n is a, c, g, or t
  misc_feature (951)..(952): n is a, c, g, or t
  misc_feature (955)..(955): n is a, c, g, or t
  misc_feature (959)..(959): n is a, c, g, or t
  misc_feature (963)..(963): n is a, c, g, or t
  misc_feature (981)..(981): n is a, c, g, or t
  misc_feature (1004)..(1004): n is a, c, g, or t
  misc_feature (1011)..(1011): n is a, c, g, or t
  misc_feature (1024)..(1024): n is a, c, g, or t
  misc_feature (1026)..(1026): n is a, c, g, or t
  misc_feature (1039)..(1040): n is a, c, g, or t
  misc_feature (1049)..(1049): n is a, c, g, or t
  misc_feature (1054)..(1054): n is a, c, g, or t
  misc_feature (1061)..(1061): n is a, c, g, or t
  misc_feature (1063)..(1063): n is a, c, g, or t
  misc_feature (1072)..(1072): n is a, c, g, or t
  misc_feature (1075)..(1075): n is a, c, g, or t
  misc_feature (1090)..(1090): n is a, c, g, or t
  misc_feature (1102)..(1102): n is a, c, g, or t
  misc_feature (1105)..(1105): n is a, c, g, or t
  misc_feature (1107)..(1107): n is a, c, g, or t
  misc_feature (1120)..(1120): n is a, c, g, or t
  misc_feature (1133)..(1133): n is a, c, g, or t
  misc_feature (1141)..(1141): n is a, c, g, or t
  misc_feature (1146)..(1146): n is a, c, g, or t
  misc_feature (1151)..(1151): n is a, c, g, or t
  misc_feature (1155)..(1155): n is a, c, g, or t
  misc_feature (1157)..(1157): n is a, c, g, or t
  misc_feature (1161)..(1162): n is a, c, g, or t
  misc_feature (1165)..(1165): n is a, c, g, or t
  misc_feature (1168)..(1169): n is a, c, g, or t
  misc_feature (1175)..(1176): n is a, c, g, or t
  misc_feature (1180)..(1182): n is a, c, g, or t
  misc_feature (1187)..(1187): n is a, c, g, or t
  misc_feature (1192)..(1193): n is a, c, g, or t
  misc_feature (1199)..(1204): n is a, c, g, or t
  misc_feature (1209)..(1218): n is a, c, g, or t
  misc_feature (1220)..(1220): n is a, c, g, or t
  misc_feature (1222)..(1222): n is a, c, g, or t
  misc_feature (1225)..(1229): n is a, c, g, or t
taattagaganattactatgagaggatcgcatcaccatcaccatcacggatcctatttaggtgacactatagaatcgtcgacccacgcgtccgagccgacaggggcttccgagcgagcagagtcccgcgccccgcactccatggagcagctgctgcgcgccgagctgcgcaccgcgaccctgcgggccttcggcggccccggcgccggctgcatcagcgagggccgagcctacgacacggacgcaggcccagtgttcgtcaaagtcaaccgcaggacgcaggcccggcagatgtttgagggggaggtggccagcctggaggccctccggagcacgggcctggtgcgggtgccgaggcccatgaaggtcatcgacctgccgggaggtggggccgcctttgtgatggagcatttgaagatgaagagcttgagcagtcaagcatcaaaacttggagagcagatggcagatttgcatctttacaaccagaagctcagggagaagttgaaggaggaggagaacacagtgggccgaanaggtgagggtgctgagcctcagtatgtggacaagttcggcttccacacggtgacgtgctgcggcttcatcccgcaggtgaatgagtggcaggatgactggccgacctttttcgcccggcaccggctccaggcgcagctggacctcattgagaaggactatgctgaccgagaggcacgagaactctggtcccggctacaggtgaagatcccggatctgttttgtggcctanagattgtccccgcgttgctccacggggatctctggtcgggaaacgtggctgaagacgacgtggggcccattatttacgacccnggcttccttctatggccattccgagtttganctggcaatcncnttgatgtttggggggnttccccanatcnttnttccccgcctaccaccgnaagatccccaaggnnccngggnttcnacaagcggctgctgcttnacagttgtttacttcctgaaccnctggaancccttcggggggnantaaagaacccttnnttgggcacnttgcnaaggtgntnaataagggnccntgcctcctttccttntcccgtccccgnttncnttccccgttcttnttccccgtccccntcttgggncccgnccttncccntnttcnnttnccnncccttnntttnnnccccntcccnntttttnnnnnnccccnnnnnnnnnntncnttnnnnn

SEQ ID NO: 298 - DNA, 1259 bp, Homo Sapiens
  misc_feature (2)..(2): n is a, c, g, or t
  misc_feature (965)..(965): n is a, c, g, or t
  misc_feature (971)..(971): n is a, c, g, or t
  misc_feature (1048)..(1048): n is a, c, g, or t
  misc_feature (1057)..(1057): n is a, c, g, or t
  misc_feature (1062)..(1062): n is a, c, g, or t
  misc_feature (1065)..(1065): n is a, c, g, or t
  misc_feature (1069)..(1069): n is a, c, g, or t
  misc_feature (1074)..(1074): n is a, c, g, or t
  misc_feature (1077)..(1077): n is a, c, g, or t
  misc_feature (1082)..(1082): n is a, c, g, or t
  misc_feature (1095)..(1095): n is a, c, g, or t
  misc_feature (1097)..(1097): n is a, c, g, or t
  misc_feature (1115)..(1115): n is a, c, g, or t
  misc_feature (1119)..(1119): n is a, c, g, or t
  misc_feature (1125)..(1125): n is a, c, g, or t
  misc_feature (1135)..(1135): n is a, c, g, or t
  misc_feature (1155)..(1155): n is a, c, g, or t
  misc_feature (1158)..(1158): n is a, c, g, or t
  misc_feature (1161)..(1161): n is a, c, g, or t
  misc_feature (1171)..(1171): n is a, c, g, or t
  misc_feature (1185)..(1185): n is a, c, g, or t
  misc_feature (1190)..(1190): n is a, c, g, or t
  misc_feature (1193)..(1193): n is a, c, g, or t
  misc_feature (1200)..(1200): n is a, c, g, or t
  misc_feature (1204)..(1204): n is a, c, g, or t
  misc_feature (1206)..(1206): n is a, c, g, or t
  misc_feature (1213)..(1213): n is a, c, g, or t
  misc_feature (1217)..(1217): n is a, c, g, or t
  misc_feature (1223)..(1223): n is a, c, g, or t
  misc_feature (1234)..(1234): n is a, c, g, or t
  misc_feature (1238)..(1238): n is a, c, g, or t
  misc_feature (1244)..(1244): n is a, c, g, or t
cnattagagaaattactatgaagaggatcgcatcaccatcaccatcacggatcctatttaggtgacactatagaatcgtcgacccacgcgtccgagctgttaaggtactacacatctgcctctggtgatgagatggtttctctcaaggactactgcaccagaatgaaggagaaccagaaacatatctattatatcacaggtgagaccaaggaccaggtagctaactcagcctttgtggaacgtcttcggaaacatggcttagaagtgatctatatgattgagcccattgatgagtactgtgtccaacagctgaaggaatttgaggggaagactttagtgtcagtcaccaaagaaggcctggaacttccagaggatgaagaagagaaaaagaagcaggaagagaaaaaaacaaagtttgagaacctctgcaaaatcatgaaagacatattggagaaaaaagttgaaaaggtggttgtgtcaaaccgattggtgacatctccatgctgtattgtcacaagcacatatggctggacagcaaacatggagagaatcatgaaagctcaagccctaagagacaactcaacaatgggttacatggcagcaaagaaacacctggagataaaccctgaccattccattattgagaccttaaggcaaaaggcagaggctgataagaacgacaagtctgtgaaggatctggtcatcttgctttatgaaactgcgctcctgtcttctggcttcagtctggaagatccccagacacatgctaacaggatctacaggatgatcaaacttggtctgggtattgatgaagatgaccctactgctgatgataccagtgctgctgtaactgaagaaatgccacccccttgaaggagatgacgacacatcacgcatggaagaagtagactaatctctggctgagggatgacttacctgttccagtactctacaattcctctganaatatnttttccagggaggtttttctttattttgttaatattaaaaagtctgttggcatgacactactttaaggggaaataanatttctggnctctnagnggangctgnganccctnagccctaagccananctggaaggcctttttganttcnggtggnttattttccnaattggggtaccggccccgnaanacnttgtaaacgnggttacctttgggnccaanggnttacctnccancnggagccnaaanaaccancctgttttganggtncggacngttcttgggtttaaa

SEQ ID NO: 299 - DNA, 1200 bp, Homo Sapiens
  misc_feature (11)..(11): n is a, c, g, or t
  misc_feature (767)..(767): n is a, c, g, or t
  misc_feature (800)..(800): n is a, c, g, or t
  misc_feature (806)..(806): n is a, c, g, or t
  misc_feature (816)..(816): n is a, c, g, or t
  misc_feature (821)..(821): n is a, c, g, or t
  misc_feature (825)..(825): n is a, c, g, or t
  misc_feature (830)..(830): n is a, c, g, or t
  misc_feature (873)..(873): n is a, c, g, or t
  misc_feature (886)..(886): n is a, c, g, or t
  misc_feature (922)..(922): n is a, c, g, or t
  misc_feature (928)..(928): n is a, c, g, or t
  misc_feature (930)..(930): n is a, c, g, or t
  misc_feature (937)..(937): n is a, c, g, or t
  misc_feature (945)..(945): n is a, c, g, or t
  misc_feature (947)..(947): n is a, c, g, or t
  misc_feature (962)..(962): n is a, c, g, or t
  misc_feature (970)..(971): n is a, c, g, or t
  misc_feature (974)..(974): n is a, c, g, or t
  misc_feature (982)..(982): n is a, c, g, or t
  misc_feature (992)..(992): n is a, c, g, or t
  misc_feature (999)..(999): n is a, c, g, or t
  misc_feature (1010)..(1010): n is a, c, g, or t
  misc_feature (1015)..(1016): n is a, c, g, or t
  misc_feature (1025)..(1025): n is a, c, g, or t
  misc_feature (1031)..(1031): n is a, c, g, or t
  misc_feature (1038)..(1038): n is a, c, g, or t
  misc_feature (1048)..(1048): n is a, c, g, or t
  misc_feature (1050)..(1050): n is a, c, g, or t
  misc_feature (1055)..(1055): n is a, c, g, or t
  misc_feature (1066)..(1066): n is a, c, g, or t
  misc_feature (1069)..(1069): n is a, c, g, or t
  misc_feature (1071)..(1071): n is a, c, g, or t
  misc_feature (1075)..(1075): n is a, c, g, or t
  misc_feature (1077)..(1077): n is a, c, g, or t
  misc_feature (1079)..(1079): n is a, c, g, or t
  misc_feature (1083)..(1084): n is a, c, g, or t
  misc_feature (1088)..(1089): n is a, c, g, or t
  misc_feature (1091)..(1091): n is a, c, g, or t
  misc_feature (1094)..(1094): n is a, c, g, or t
  misc_feature (1106)..(1106): n is a, c, g, or t
  misc_feature (1110)..(1110): n is a, c, g, or t
  misc_feature (1112)..(1114): n is a, c, g, or t
  misc_feature (1117)..(1117): n is a, c, g, or t
  misc_feature (1122)..(1123): n is a, c, g, or t
  misc_feature (1130)..(1130): n is a, c, g, or t
  misc_feature (1134)..(1135): n is a, c, g, or t
  misc_feature (1137)..(1137): n is a, c, g, or t
  misc_feature (1139)..(1139): n is a, c, g, or t
  misc_feature (1141)..(1144): n is a, c, g, or t
  misc_feature (1149)..(1149): n is a, c, g, or t
  misc_feature (1151)..(1152): n is a, c, g, or t
  misc_feature (1155)..(1156): n is a, c, g, or t
  misc_feature (1161)..(1161): n is a, c, g, or t
  misc_feature (1164)..(1164): n is a, c, g, or t
  misc_feature (1168)..(1170): n is a, c, g, or t
  misc_feature (1172)..(1174): n is a, c, g, or t
  misc_feature (1176)..(1177): n is a, c, g, or t
  misc_feature (1179)..(1181): n is a, c, g, or t
  misc_feature (1184)..(1184): n is a, c, g, or t
  misc_feature (1187)..(1190): n is a, c, g, or t
gaaaattaacnatgagaggatcgcatcaccatcaccatcacggatcctatttaggtgacactatagaatcgtcgacccacgcgtccgtggggccacatggggatggaggagttgggggtggggatgggagactcatcctggctggcacagctgcccgcagcagggcctcagaggtggtcagatgtggggcccctggaggggtggtcaggcgggaggtgcagtgtggctcccctccgcatgcatgtccaccctccctgctcttgaaacagcatcctgcttgggtaaaagtgccacccatgcccactccggggtctgccagccctgctcagggcagttgaccattggcagtgtccttgctggaccacgggagcccatgtcagcgtcgttgctgcccctgctggcctgggctggtgctgcgggttctcacctgagccatatgcaggagatgctgtagcctcttctcccctggggacttgtgtccatcctacaggaccagacttcaccacgtgctggggcagccactgctcccttgtcttcactgtccagagtggcagtgggagagtgcgcctaagggagtccctgggcagaattctcttctgcccgccccttcccacccgagcacacccgggcccccaccccactgccaccatgacgattccctcgccttgcagggctagggcaaagctggggccggcgctggtgcacagctctggagcttgggctcgggtgtgtggtttcacttcctgggtgccaggcgctgctgtcancctttcggtgcattggctcatgatccccaccantccgancagggcatangtgangaanctgangtgctaagatggcaggctcccctcacaagggcaacacagcccntgggggcccccanccactcacccaatcctcatgtttccctgaaattcangaagancntggtcanggcctgtntnatggcccaaggaaanaaaaagtnnccncctgctgncaaaaaaggncatcccntccggcctggnccggnnaaaaaacanctcctntttttcnaaaaaacatngnaaaantttttttcttnccnancccnantncaanncaanncntgntcccaaaagttntttntnnnccnaaagnnccctggntaannancnannnnccaantnnggnncaaantgntttnnngnnnannannnccnggnnnnaaaaaaaaaa

SEQ ID NO: 300 - DNA, 256 bp, Homo Sapiens
gcttccaggacgtgggaccccaggccccagtgggctctgtgtaccagaagaccaatgccgtgtctgagattaaaagggttggtaaagacagcttctgggccaaagcagagaaggaggaggagaaccgtcggctggaggaaaagcggcgggccgaggaggcacagcggcagctggagcaggagcgccgggagcgtgagctgcgtgaggctgcacgccgggagcagcgctatcaggagcagggtggcgaggccagccc

SEQ ID NO: 301 - DNA, 256 bp, Homo Sapiens
tgatggctggcggagtcatggacaaggagtacgtgggttttgctgctctccccaaccagctgcaccgcaagtctgtcaagaaggggtttgacttcacgctaatggtggcaggggagtcaggcctagggaaatccaccctcatcaacagcctcttcctcaccaacctctatgaggatcgccaggtgccagaggccagtgctcgcttgacacagaccctggccattgagcgccggggcgtagagattgaggaaggggt

SEQ ID NO: 302 - DNA, 256 bp, Homo Sapiens
  misc_feature (18)..(18): n is a, c, g, or t
  misc_feature (42)..(42): n is a, c, g, or t
ttattaagaggagaaatnactctgagaggatcgatacctacntcacggatcctatttaggtgacactatagaatcgtcgacccacgcgtccgcaatggtggagaagaaaacttcggttcgctcccaggaccccgggcagcggcgggtgctggaccgggctgcccggcagcgtcgcatcaaccggcagctggaggccctggagaatgacaacttccaggatgacccccacgcgggactccctcagctcggcaagaga

SEQ ID NO: 303 - DNA, 1386 bp, Homo Sapiens
  misc_feature (3)..(3): n is a, c, g, or t
  misc_feature (5)..(5): n is a, c, g, or t
  misc_feature (81)..(81): n is a, c, g, or t
  misc_feature (123)..(123): n is a, c, g, or t
  misc_feature (158)..(158): n is a, c, g, or t
  misc_feature (172)..(172): n is a, c, g, or t
  misc_feature (185)..(185): n is a, c, g, or t
  misc_feature (215)..(215): n is a, c, g, or t
  misc_feature (260)..(261): n is a, c, g, or t
  misc_feature (286)..(286): n is a, c, g, or t
  misc_feature (288)..(288): n is a, c, g, or t
  misc_feature (296)..(297): n is a, c, g, or t
  misc_feature (311)..(311): n is a, c, g, or t
  misc_feature (319)..(320): n is a, c, g, or t
  misc_feature (322)..(322): n is a, c, g, or t
  misc_feature (325)..(325): n is a, c, g, or t
  misc_feature (328)..(328): n is a, c, g, or t
  misc_feature (338)..(338): n is a, c, g, or t
  misc_feature (355)..(355): n is a, c, g, or t
  misc_feature (368)..(369): n is a, c, g, or t
  misc_feature (386)..(386): n is a, c, g, or t
  misc_feature (409)..(409): n is a, c, g, or t
  misc_feature (412)..(412): n is a, c, g, or t
  misc_feature (414)..(414): n is a, c, g, or t
  misc_feature (425)..(426): n is a, c, g, or t
  misc_feature (428)..(428): n is a, c, g, or t
  misc_feature (432)..(432): n is a, c, g, or t
  misc_feature (435)..(435): n is a, c, g, or t
  misc_feature (442)..(442): n is a, c, g, or t
  misc_feature (458)..(458): n is a, c, g, or t
  misc_feature (461)..(461): n is a, c, g, or t
  misc_feature (467)..(467): n is a, c, g, or t
  misc_feature (475)..(475): n is a, c, g, or t
  misc_feature (479)..(479): n is a, c, g, or t
  misc_feature (483)..(483): n is a, c, g, or t
  misc_feature (495)..(496): n is a, c, g, or t
  misc_feature (506)..(506): n is a, c, g, or t
  misc_feature (526)..(526): n is a, c, g, or t
  misc_feature (532)..(532): n is a, c, g, or t
  misc_feature (538)..(538): n is a, c, g, or t
  misc_feature (542)..(542): n is a, c, g, or t
  misc_feature (548)..(548): n is a, c, g, or t
  misc_feature (552)..(552): n is a, c, g, or t
  misc_feature (556)..(556): n is a, c, g, or t
  misc_feature (558)..(558): n is a, c, g, or t
  misc_feature (583)..(584): n is a, c, g, or t
  misc_feature (588)..(588): n is a, c, g, or t
  misc_feature (592)..(592): n is a, c, g, or t
  misc_feature (600)..(601): n is a, c, g, or t
  misc_feature (611)..(612): n is a, c, g, or t
  misc_feature (614)..(614): n is a, c, g, or t
  misc_feature (616)..(617): n is a, c, g, or t
  misc_feature (621)..(621): n is a, c, g, or t
  misc_feature (627)..(627): n is a, c, g, or t
  misc_feature (629)..(629): n is a, c, g, or t
  misc_feature (642)..(642): n is a, c, g, or t
  misc_feature (650)..(651): n is a, c, g, or t
  misc_feature (657)..(657): n is a, c, g, or t
  misc_feature (663)..(663): n is a, c, g, or t
  misc_feature (675)..(676): n is a, c, g, or t
  misc_feature (694)..(694): n is a, c, g, or t
  misc_feature (696)..(696): n is a, c, g, or t
  misc_feature (712)..(714): n is a, c, g, or t
  misc_feature (718)..(718): n is a, c, g, or t
  misc_feature (720)..(720): n is a, c, g, or t
  misc_feature (724)..(724): n is a, c, g, or t
  misc_feature (735)..(735): n is a, c, g, or t
  misc_feature (741)..(741): n is a, c, g, or t
  misc_feature (744)..(745): n is a, c, g, or t
  misc_feature (750)..(750): n is a, c, g, or t
  misc_feature (752)..(752): n is a, c, g, or t
  misc_feature (758)..(758): n is a, c, g, or t
  misc_feature (761)..(761): n is a, c, g, or t
  misc_feature (768)..(768): n is a, c, g, or t
  misc_feature (771)..(771): n is a, c, g, or t
  misc_feature (777)..(777): n is a, c, g, or t
  misc_feature (780)..(780): n is a, c, g, or t
  misc_feature (782)..(782): n is a, c, g, or t
  misc_feature (796)..(796): n is a, c, g, or t
  misc_feature (798)..(798): n is a, c, g, or t
  misc_feature (803)..(803): n is a, c, g, or t
  misc_feature (807)..(808): n is a, c, g, or t
  misc_feature (810)..(810): n is a, c, g, or t
  misc_feature (812)..(812): n is a, c, g, or t
  misc_feature (816)..(816): n is a, c, g, or t
  misc_feature (818)..(819): n is a, c, g, or t
  misc_feature (828)..(828): n is a, c, g, or t
  misc_feature (831)..(831): n is a, c, g, or t
  misc_feature (833)..(833): n is a, c, g, or t
  misc_feature (835)..(835): n is a, c, g, or t
  misc_feature (852)..(852): n is a, c, g, or t
  misc_feature (857)..(857): n is a, c, g, or t
  misc_feature (859)..(860): n is a, c, g, or t
  misc_feature (862)..(862): n is a, c, g, or t
  misc_feature (864)..(864): n is a, c, g, or t
  misc_feature (866)..(866): n is a, c, g, or t
  misc_feature (875)..(876): n is a, c, g, or t
  misc_feature (879)..(879): n is a, c, g, or t
  misc_feature (883)..(883): n is a, c, g, or t
  misc_feature (886)..(888): n is a, c, g, or t
  misc_feature (892)..(894): n is a, c, g, or t
  misc_feature (901)..(901): n is a, c, g, or t
  misc_feature (903)..(903): n is a, c, g, or t
  misc_feature (909)..(909): n is a, c, g, or t
  misc_feature (915)..(915): n is a, c, g, or t
  misc_feature (920)..(922): n is a, c, g, or t
  misc_feature (926)..(926): n is a, c, g, or t
  misc_feature (929)..(929): n is a, c, g, or t
  misc_feature (932)..(935): n is a, c, g, or t
  misc_feature (937)..(937): n is a, c, g, or t
  misc_feature (940)..(940): n is a, c, g, or t
  misc_feature (942)..(942): n is a, c, g, or t
  misc_feature (946)..(947): n is a, c, g, or t
  misc_feature (949)..(949): n is a, c, g, or t
  misc_feature (957)..(957): n is a, c, g, or t
  misc_feature (960)..(960): n is a, c, g, or t
  misc_feature (962)..(962): n is a, c, g, or t
  misc_feature (964)..(964): n is a, c, g, or t
  misc_feature (966)..(967): n is a, c, g, or t
  misc_feature (972)..(973): n is a, c, g, or t
  misc_feature (981)..(983): n is a, c, g, or t
  misc_feature (987)..(987): n is a, c, g, or t
  misc_feature (989)..(990): n is a, c, g, or t
  misc_feature (992)..(993): n is a, c, g, or t
  misc_feature (995)..(995): n is a, c, g, or t
  misc_feature (997)..(998): n is a, c, g, or t
  misc_feature (1001)..(1003): n is a, c, g, or t
  misc_feature (1006)..(1007): n is a, c, g, or t
  misc_feature (1019)..(1019): n is a, c, g, or t
  misc_feature (1030)..(1030): n is a, c, g, or t
  misc_feature (1032)..(1032): n is a, c, g, or t
  misc_feature (1034)..(1036): n is a, c, g, or t
  misc_feature (1044)..(1044): n is a, c, g, or t
  misc_feature (1056)..(1058): n is a, c, g, or t
  misc_feature (1061)..(1061): n is a, c, g, or t
  misc_feature (1064)..(1064): n is a, c, g, or t
  misc_feature (1067)..(1067): n is a, c, g, or t
  misc_feature (1071)..(1071): n is a, c, g, or t
  misc_feature (1075)..(1075): n is a, c, g, or t
  misc_feature (1079)..(1079): n is a, c, g, or t
  misc_feature (1083)..(1083): n is a, c, g, or t
  misc_feature (1086)..(1086): n is a, c, g, or t
  misc_feature (1088)..(1088): n is a, c, g, or t
  misc_feature (1093)..(1093): n is a, c, g, or t
  misc_feature (1096)..(1097): n is a, c, g, or t
  misc_feature (1100)..(1100): n is a, c, g, or t
  misc_feature (1102)..(1102): n is a, c, g, or t
  misc_feature (1104)..(1105): n is a, c, g, or t
  misc_feature (1120)..(1120): n is a, c, g, or t
  misc_feature (1122)..(1122): n is a, c, g, or t
  misc_feature (1130)..(1130): n is a, c, g, or t
  misc_feature (1132)..(1132): n is a, c, g, or t
  misc_feature (1148)..(1148): n is a, c, g, or t
  misc_feature (1151)..(1152): n is a, c, g, or t
  misc_feature (1157)..(1157): n is a, c, g, or t
  misc_feature (1160)..(1160): n is a, c, g, or t
  misc_feature (1162)..(1162): n is a, c, g, or t
  misc_feature (1164)..(1165): n is a, c, g, or t
  misc_feature (1169)..(1174): n is a, c, g, or t
  misc_feature (1176)..(1176): n is a, c, g, or t
  misc_feature (1183)..(1183): n is a, c, g, or t
  misc_feature (1187)..(1187): n is a, c, g, or t
  misc_feature (1191)..(1193): n is a, c, g, or t
  misc_feature (1196)..(1196): n is a, c, g, or t
  misc_feature (1198)..(1198): n is a, c, g, or t
  misc_feature (1200)..(1200): n is a, c, g, or t
  misc_feature (1206)..(1206): n is a, c, g, or t
  misc_feature (1212)..(1215): n is a, c, g, or t
  misc_feature (1218)..(1218): n is a, c, g, or t
  misc_feature (1221)..(1221): n is a, c, g, or t
  misc_feature (1223)..(1224): n is a, c, g, or t
  misc_feature (1226)..(1226): n is a, c, g, or t
  misc_feature (1234)..(1234): n is a, c, g, or t
  misc_feature (1237)..(1238): n is a, c, g, or t
  misc_feature (1241)..(1243): n is a, c, g, or t
  misc_feature (1246)..(1248): n is a, c, g, or t
  misc_feature (1259)..(1259): n is a, c, g, or t
  misc_feature (1268)..(1268): n is a, c, g, or t
  misc_feature (1270)..(1276): n is a, c, g, or t
  misc_feature (1283)..(1284): n is a, c, g, or t
  misc_feature (1287)..(1295): n is a, c, g, or t
  misc_feature (1297)..(1298): n is a, c, g, or t
  misc_feature (1307)..(1307): n is a, c, g, or t
  misc_feature (1309)..(1309): n is a, c, g, or t
  misc_feature (1316)..(1320): n is a, c, g, or t
  misc_feature (1324)..(1324): n is a, c, g, or t
  misc_feature (1326)..(1326): n is a, c, g, or t
  misc_feature (1330)..(1331): n is a, c, g, or t
  misc_feature (1334)..(1334): n is a, c, g, or t
  misc_feature (1338)..(1338): n is a, c, g, or t
  misc_feature (1341)..(1342): n is a, c, g, or t
  misc_feature (1345)..(1346): n is a, c, g, or t
  misc_feature (1356)..(1356): n is a, c, g, or t
  misc_feature (1358)..(1358): n is a, c, g, or t
  misc_feature (1362)..(1365): n is a, c, g, or t
  misc_feature (1368)..(1371): n is a, c, g, or t
  misc_feature (1373)..(1373): n is a, c, g, or t
  misc_feature (1379)..(1379): n is a, c, g, or t
  misc_feature (1385)..(1385): n is a, c, g, or t
ccnantaagaggaaaattaactatggagaggatcgcattcaccactcaccatcacggatcctatttaggtgacacctatanaatcgctcgtacccacgcgttccgcggggttgggagacggancccaggccgggaagcaggcgccgccgccacaggcnaccatggggaacgngtttggctgccanctcgccgcccgcagggtcgccaccgccgcntgcgccggccctcgtggggttgccgccacctccgccctcgccgcnnggcttcacgctgccgccgctgggangnagcctggnngccggcaccagtangagtccanntncgnaangaacccccgnggctgcataccgccagnggcctcaggggcnncccaggatggggcctgnggctgcctgcccaacccgggaanatncnaggagtgccannangaantgnaaggagntgtttcccattcaganggngggtgncaagctcncagncaanaaagggtggagnnaaccaccaanattttttttttttttttttncccccncacccncaangcgggngaangccnanctaaaaaaaaaaaaaaaaacaaatnntggngganaaactcgnntgaatttccnnanannagtncgttcncnttgtactgttggntgacattnnaacgancagtgntcataccacaanntttaaggttcaattacananaacatgggacccccgnnncttnanggtntcagaaaaggnccatcngannacctnantaagtncanaattttngtngaacgngancntgtcgtaccgggantntcccngggnntntnaatntnnccaagctcnccntncncccttgggggaaacccnaaaantnnancnangggttcaannaantctngtnnncccnnntaaactncnaaaaanatcatngctannncttnaancannnnantananaatnnanagtcctanaancngnannacatnnaaaagtannnacananncnnantnnttnnngtnngaaaattttgtntattaaaaaananannnggcaaaanttaaacgtttgnnnaangtnaanattntgcncagnattntanantatantcnntcngnannatgttaaagggtggngntgacattngnacttaattcaattgtnaannataanaantntnnttannnnnnanatttagnccangccnnntantncncatctntttcannnnacncanannanataagagnganngannnccnnnacgagataatnctcctcccntnnnnnnnatatcannccnnnnnnnnntnntatccaacntnaaatacnnnnngttntngacnncanaacntanntcnngccccctctntnttannnntannnnanatcaanccctgng

SEQ ID NO: 304 - DNA, 256 bp, Homo Sapiens
  misc_feature (2)..(2): n is a, c, g, or t
gngaattaactatgagaggatcgcatcaccatcaccatcacggatcctatttaggtgacactatagaatcgtcgacccacgcgtccggagatgaaaaagaattggacaaaagagaaaaagccaagaaattggacaaagagaatctcagtgatgaaagagccagtgggcaaagttgtacattgcccaagcgttctgatagcgaacttaaagatgaaaaaccaaagagacctgaagatgagagcggcagagactatag

SEQ ID NO: 305 - DNA, 256 bp, Homo Sapiens
cgatgggcatctctcgggacaactggcacaagcgccgcaaaaccgggggcaagagaaagccctaccacaagaagcggaagtatgagttggggcgcccagctgccaacaccaagattggcccccgccgcatccacacagtccgtgtgcggggaggtaacaagaaataccgtgccctgaggttggacgtggggaatttctcctggggctcagagtgttgtactcgtaaaacaaggatcatcgatgttgtctacaatgc

SEQ ID NO: 306 - DNA, 256 bp, Homo Sapiens
  misc_feature (2)..(4): n is a, c, g, or t
  misc_feature (8)..(10): n is a, c, g, or t
tnnnaggnnnaattaactatgagaggatcgcatcaccatcaccatcacggatcctatttaggtgacactatagaatcgtcgacccacgcgtccgcccacgcgtccgctgacgcttacaagatcacccccggcgctcgaggagccttctccgaggagtacaagcggctcgatgaggacctggctgcctactgccgccgccgggacatcagaattcttgtgcttgatgacaccaaccacgaacgggaacggctggagc

SEQ ID NO: 307 - DNA, 256 bp, Homo Sapiens
  misc_feature (3)..(3): n is a, c, g, or t
  misc_feature (18)..(18): n is a, c, g, or t
  misc_feature (42)..(42): n is a, c, g, or t
  misc_feature (244)..(245): n is a, c, g, or t
ttnttaagaggagaaatnactctgagaggatcgatacctacntacggatcctatttaggtgacactatagaatcgtcgacccacgcgtccgctgagattgagcagaagataaggagtacaatgcccagatcaacagcaacctcttcatgagcttgaacaaggacggttcttacacaggcttcatcaaggttcagctgaagctggtgcgccctgtctctgtgccctccagcaagaagccaccctnnttgcaggatgc

SEQ ID NO: 308 - DNA, 256 bp, Homo Sapiens
  misc_feature (6)..(6): n is a, c, g, or t
  misc_feature (206)..(206): n is a, c, g, or t
tagagnaaattactatgagaggatcgcatcaccatcaccatcacggatcctatttaggtgacactatagaatcgtcgacccacgcgtccgaactacccctaaaagccaaaatgggaaaggaaaagactcatatcaacattgtcgtcattggacacgtagattcgggcaagtccaccactactggccatctgatctataaatgcggnggcatcgacaaaagaaccattgaaaaatttgagaaggaggctgctgagat

SEQ ID NO: 309 - DNA, 256 bp, Homo Sapiens
cccgaagcgcctgtctacgcgaacctgagcagctacgcgggcggcgccgggggcgcggggggcgccgcgacggtcgccttcgctgccgaacctgtgcccttcccgccgccgccacccccaggcgcgttggggccgccgcgcctggctgcgctcaaggacgagccacagacggtgcccgacgtgccgagcttcggcgagagcccgccgttgtcgcccatcgacatggacacgcaggagcgcatcaaggcggagcgca

SEQ ID NO: 310 - DNA, 256 bp, Homo Sapiens
taagaggagaattaactatgagaggatcgcatcaccatcaccatcacggatcctatttaggtgacactatagaatcgtcgacccacgcgtccgagaccttctcctcttcctcctcatccaagaagatgggcagcatcttcgaccgcgaggaccaggccagcccacgggccggcagcctggcggcgctcgagaaacggcaggccgagaagaagaaagagctgatgaaggcgcagagtctgcccaagacctcagcctc

SEQ ID NO: 311 - DNA, 1084 bp, Homo Sapiens
  misc_feature (3)..(4): n is a, c, g, or t
  misc_feature (6)..(11): n is a, c, g, or t
  misc_feature (13)..(13): n is a, c, g, or t
  misc_feature (15)..(15): n is a, c, g, or t
  misc_feature (273)..(273): n is a, c, g, or t
  misc_feature (276)..(276): n is a, c, g, or t
  misc_feature (797)..(797): n is a, c, g, or t
  misc_feature (816)..(816): n is a, c, g, or t
  misc_feature (863)..(863): n is a, c, g, or t
  misc_feature (879)..(879): n is a, c, g, or t
  misc_feature (906)..(906): n is a, c, g, or t
  misc_feature (918)..(918): n is a, c, g, or t
  misc_feature (924)..(924): n is a, c, g, or t
  misc_feature (934)..(936): n is a, c, g, or t
  misc_feature (939)..(939): n is a, c, g, or t
  misc_feature (942)..(942): n is a, c, g, or t
  misc_feature (947)..(948): n is a, c, g, or t
  misc_feature (952)..(953): n is a, c, g, or t
  misc_feature (956)..(956): n is a, c, g, or t
  misc_feature (959)..(959): n is a, c, g, or t
  misc_feature (963)..(963): n is a, c, g, or t
  misc_feature (968)..(969): n is a, c, g, or t
  misc_feature (976)..(976): n is a, c, g, or t
  misc_feature (978)..(981): n is a, c, g, or t
  misc_feature (983)..(984): n is a, c, g, or t
  misc_feature (987)..(987): n is a, c, g, or t
  misc_feature (990)..(992): n is a, c, g, or t
  misc_feature (995)..(995): n is a, c, g, or t
  misc_feature (998)..(998): n is a, c, g, or t
  misc_feature (1005)..(1007): n is a, c, g, or t
  misc_feature (1017)..(1018): n is a, c, g, or t
  misc_feature (1022)..(1022): n is a, c, g, or t
  misc_feature (1024)..(1024): n is a, c, g, or t
  misc_feature (1028)..(1028): n is a, c, g, or t
  misc_feature (1031)..(1040): n is a, c, g, or t
  misc_feature (1042)..(1078): n is a, c, g, or t
  misc_feature (1080)..(1084): n is a, c, g, or t
atnntnnnnnnantngagagattactatgagaggatcgcatcaccatcaccatcacggatcctatttaggtgacactatagaatcgtcgacccacgcgtccgatcatctgctcctgcttctacacacagccgcaccccaataccgtctaccagtacggggacatggaggtgaagcagctggacaagcgggcctcaggccagagcttcgaggtcatcctcaagtccccttctgacctgtccccagagagccctatgctctcctccccacccaanaanaaggacacctccctggaggagctgcaaaagcggctggaggcagccgaggagcggaggaagacgcaggaggcgcaggtgctgaagcagctggcggagcggcgcgagcacgagcgcgaggtgctgcacaaggcgctggaggagaataacaacttcagccgccaggcggaggagaagctcaactacaagatggagctcagcaaggagatccgcgaggcacacctggccgcactgcgcgagcggctgcgcgagaaggagctgcacgcggccgaggtgcgcaggaacaaggagcagcgagaagagatgtcgggctaagggcccgggacgggcggcgcccatcctgcgacggaacacgttcgggttttggttttgtttcgttcacctctgtctagatgcaacttttgttcctcctcccccaccccagcccccagcttcatgcttctcttccgcactcagccgccctgccctgtcctcgtggtgagtcgctgaccacggcttcccctgcaggagccgccgggcgtganacgcggtccctcggtgcanacaccaggccgggcgcggctgggtcccccgggggccctgtgaaaaangtggcggtgaccgtgntaaacccagggcggtggcgtgggatcncgggtccttacnctgggntgtctggtcnnnacntgnaggtnngggnnggnctntganccggnnccctggncnnnngnnagntannnacntgntgttttnnnggggaagggnncccntnaggnagnnnnnnnnnnannnnnnnnnnnnnnnnnnnnnnnnnnnnnnnnnnnnntnnnnn

SEQ ID NO: 312 - DNA, 1190 bp, Homo Sapiens
  misc_feature (893)..(893): n is a, c, g, or t
  misc_feature (906)..(907): n is a, c, g, or t
  misc_feature (932)..(932): n is a, c, g, or t
  misc_feature (951)..(951): n is a, c, g, or t
  misc_feature (971)..(971): n is a, c, g, or t
  misc_feature (986)..(986): n is a, c, g, or t
  misc_feature (988)..(988): n is a, c, g, or t
  misc_feature (1002)..(1002): n is a, c, g, or t
  misc_feature (1009)..(1009): n is a, c, g, or t
  misc_feature (1032)..(1032): n is a, c, g, or t
  misc_feature (1036)..(1036): n is a, c, g, or t
  misc_feature (1039)..(1039): n is a, c, g, or t
  misc_feature (1047)..(1047): n is a, c, g, or t
  misc_feature (1055)..(1055): n is a, c, g, or t
  misc_feature (1062)..(1062): n is a, c, g, or t
  misc_feature (1071)..(1071): n is a, c, g, or t
  misc_feature (1073)..(1073): n is a, c, g, or t
  misc_feature (1076)..(1076): n is a, c, g, or t
  misc_feature (1080)..(1080): n is a, c, g, or t
  misc_feature (1084)..(1086): n is a, c, g, or t
  misc_feature (1110)..(1110): n is a, c, g, or t
  misc_feature (1122)..(1122): n is a, c, g, or t
  misc_feature (1126)..(1126): n is a, c, g, or t
  misc_feature (1130)..(1130): n is a, c, g, or t
  misc_feature (1135)..(1135): n is a, c, g, or t
  misc_feature (1140)..(1140): n is a, c, g, or t
  misc_feature (1142)..(1142): n is a, c, g, or t
  misc_feature (1146)..(1146): n is a, c, g, or t
  misc_feature (1154)..(1154): n is a, c, g, or t
  misc_feature (1159)..(1159): n is a, c, g, or t
  misc_feature (1168)..(1168): n is a, c, g, or t
  misc_feature (1172)..(1172): n is a, c, g, or t
  misc_feature (1176)..(1176): n is a, c, g, or t
  misc_feature (1187)..(1187): n is a, c, g, or t
tagagaaattactatgagaggatcgcatcaccatcaccatcacggatcctatttaggtgacactatagaatcgtcgacccacgcgtccgcccacgcgtccgcagagatggagttctcttcacttcaggacatgcccaaggagctggatccctctgctgtgctccccttagactgtctgcttgcttttgtgttctttgatgccaactggtgtggctacttgcaccggcgagacttagagaggatcctccttacccttgggatccggctcagtgcagagcaggccaagcagctggtcagcagggtggtgacccagaacatctgccagtaccggagccttcagtacagccgccaggagggcctggatggtggccttcccgaggaggtgctcttcggaaacctggacctgctgccccctcctgggaaaagcacgaagccaggtgctgcccccacagaacacaaagccttggtgtcccacaatggcagcctgattaacgtggggagcctgctgcagcgcgcggagcagcaggacagcggccggctctacctagagaacaagatccacacactggagctgaagctggaggagagccataaccgtttctcagccactgaagtaaccaataagacgctggcggcagagatgcaggagctgcgagtccggctggcggaggccgaggagaccgcccggacggcggagcgacagaagagccagctccagcggctgctgcaggagctccgcaggcgtctgacccccctgcagctggagattcagcggggtggtggaaaaggctgacagctgggtggagaaggaggagccggcacctagcaactgacggcctcgcacggaactgccatcctgtgagggcagcggtggcgccccggcaaagttggancccttgcggtacnnaaagcagcgagagcgaaactggganccaggcaggggtggctgancccatgctcacctctagggnaggcaggccattcangntgggggctggcttnttggaanggatgtttgaagaacccggttcncttnaanacttaaanaaaacatnttttgcncccctaaangntcntttngccnnnaacctgggaatttcccgggggccntttaacctgggnggantttnccggnccctncngttnaaaaaaanagggnaaaaaaggntttncaanggggaaaagtntat

SEQ ID NO: 313 - DNA, 256 bp, Homo Sapiens
  misc_feature (2)..(4): n is a, c, g, or t
  misc_feature (13)..(13): n is a, c, g, or t
  misc_feature (16)..(17): n is a, c, g, or t
  misc_feature (19)..(20): n is a, c, g, or t
  misc_feature (22)..(22): n is a, c, g, or t
  misc_feature (25)..(26): n is a, c, g, or t
  misc_feature (37)..(37): n is a, c, g, or t
  misc_feature (41)..(41): n is a, c, g, or t
  misc_feature (64)..(64): n is a, c, g, or t
  misc_feature (66)..(66): n is a, c, g, or t
  misc_feature (71)..(71): n is a, c, g, or t
  misc_feature (73)..(73): n is a, c, g, or t
  misc_feature (79)..(79): n is a, c, g, or t
  misc_feature (92)..(93): n is a, c, g, or t
  misc_feature (99)..(101): n is a, c, g, or t
  misc_feature (103)..(105): n is a, c, g, or t
  misc_feature (107)..(107): n is a, c, g, or t
  misc_feature (111)..(114): n is a, c, g, or t
  misc_feature (133)..(133): n is a, c, g, or t
  misc_feature (135)..(135): n is a, c, g, or t
  misc_feature (139)..(141): n is a, c, g, or t
  misc_feature (147)..(149): n is a, c, g, or t
  misc_feature (151)..(151): n is a, c, g, or t
  misc_feature (157)..(157): n is a, c, g, or t
  misc_feature (162)..(162): n is a, c, g, or t
  misc_feature (164)..(165): n is a, c, g, or t
  misc_feature (169)..(170): n is a, c, g, or t
  misc_feature (172)..(172): n is a, c, g, or t
  misc_feature (175)..(177): n is a, c, g, or t
  misc_feature (188)..(188): n is a, c, g, or t
  misc_feature (190)..(190): n is a, c, g, or t
  misc_feature (192)..(192): n is a, c, g, or t
  misc_feature (196)..(198): n is a, c, g, or t
  misc_feature (200)..(200): n is a, c, g, or t
  misc_feature (209)..(210): n is a, c, g, or t
  misc_feature (217)..(217): n is a, c, g, or t
  misc_feature (220)..(221): n is a, c, g, or t
  misc_feature (226)..(226): n is a, c, g, or t
  misc_feature (233)..(234): n is a, c, g, or t
  misc_feature (241)..(242): n is a, c, g, or t
  misc_feature (245)..(250): n is a, c, g, or t
  misc_feature (255)..(255): n is a, c, g, or t
gnnntggtggccnggnngnncnaannattaaggagangaanttttttttgccaggggaggatantnatcancntcacgngggacttttttgnngggggnnnannnangggnnnnccgggcgcggggcgcgggngngggnnnggaagnnnangggggngggantnnacgnngnagnnnagatgggagcncnanacgnnngnccaggacgnncgggggnttnngtggnaggcgcnngaggttnngtnnnnnnttgcng

SEQ ID NO: 314 - DNA, 256 bp, Homo Sapiens
  misc_feature (19)..(19): n is a, c, g, or t
ttattaaagaggagaaatnactatgagaggatcgcatcaccatcaccatcacggatcctatttaggtgacactatagaatcgtcgacccacgcgtccgaggcactggggcccctgcagagcttccaggcccggcctgatgacctgctcatcagcacctaccccaagtccggcactacctgggtaagccagattctggacatgatctaccagggtggtgacctggagaagtgtcaccgagctcccatcttcatgcgg

SEQ ID NO: 315 - DNA, 256 bp, Homo Sapiens
  misc_feature (1)..(3): n is a, c, g, or t
  misc_feature (6)..(6): n is a, c, g, or t
nnnctntgagaggatcgcatcaccatcaccatcacggatcctatttaggtgacactatagaatcgtcgacccacgcgtccgcccacgcgtccgcccacgcgtccgcgtatttccgggggcccctgcaaaccaaggccaagttccacattacagtgggccatgaaacagtcatgggccggttgatgttcttcagtcctgctccagataactttgaccaggagcctatactggactctttcaacttctctcaagaata

SEQ ID NO: 316 - DNA, 1164 bp, Homo Sapiens
  misc_feature (888)..(888): n is a, c, g, or t
  misc_feature (921)..(921): n is a, c, g, or t
  misc_feature (928)..(928): n is a, c, g, or t
  misc_feature (930)..(930): n is a, c, g, or t
  misc_feature (940)..(940): n is a, c, g, or t
  misc_feature (949)..(949): n is a, c, g, or t
  misc_feature (961)..(961): n is a, c, g, or t
  misc_feature (992)..(992): n is a, c, g, or t
  misc_feature (1029)..(1029): n is a, c, g, or t
  misc_feature (1041)..(1041): n is a, c, g, or t
  misc_feature (1043)..(1043): n is a, c, g, or t
  misc_feature (1050)..(1050): n is a, c, g, or t
  misc_feature (1053)..(1053): n is a, c, g, or t
  misc_feature (1055)..(1055): n is a, c, g, or t
  misc_feature (1060)..(1060): n is a, c, g, or t
  misc_feature (1067)..(1067): n is a, c, g, or t
  misc_feature (1071)..(1071): n is a, c, g, or t
  misc_feature (1080)..(1080): n is a, c, g, or t
  misc_feature (1084)..(1084): n is a, c, g, or t
  misc_feature (1091)..(1091): n is a, c, g, or t
  misc_feature (1098)..(1098): n is a, c, g, or t
  misc_feature (1104)..(1104): n is a, c, g, or t
  misc_feature (1120)..(1120): n is a, c, g, or t
  misc_feature (1124)..(1124): n is a, c, g, or t
  misc_feature (1127)..(1127): n is a, c, g, or t
  misc_feature (1132)..(1132): n is a, c, g, or t
  misc_feature (1135)..(1137): n is a, c, g, or t
  misc_feature (1151)..(1151): n is a, c, g, or t
  misc_feature (1156)..(1156): n is a, c, g, or t
  misc_feature (1162)..(1162): n is a, c, g, or t
  misc_feature (1164)..(1164): n is a, c, g, or t
tagagaaattactatgagaggatcgcatcaccatcaccatcacggatcctatttaggtgacactatagaatcgtcgacccacgcgtccgcgcgcggcacgatggacggtcgggtgcagctgatgaaggccctcctggccgggcccctccggcccgcggcgcgtcgctggaggaacccgattccctttcccgagacgtttgacggagataccgaccgactcccggagttcatcgtgcagacgtgctcctacatgttcgtggacgagaacacgttctccaacgacgccctgaaggtgacgttcctcatcacccgcctcacggggccagccctgcagtgggtgatcccctacatcaggaaggagagccccctgctcaatgattaccggggcttcctggccgagatgaagcgggtctttggatgggaggaggacgaggacttctaggccgggagacccttgggcctgggggcgggtgctctgggaagagttcgctgtgccagtggccaccgctagggtctccacaggcgccctccctccgcgcctccctccccctcgagccgccgcgatgtcccctgcgctcctgtcccctcccgcgtagtgcttgcctttgttccaggaatagcgctccaggctcctgctgcagctcctgggccgcactctagagcgcgctgcctccgccctcttttgccagcccagcccctccatgcacatttggacgctgtcctgcacttcaggtgcaagctgggctcctgttacatactggacagaccacccacagccgctgctgccaacccacctccactcctccagactgccagccaactacatcattctgcccacagacctacgctaccactgccatcgccatccaccgcatctcaccaacaaantgtggctcctagtgatgtggactcacctcggangtatccnanctggaaacancccctgganagtgatccaaanagctggccgtcccccaaggacctgtcccttnagcgaaaccattttctccccatcccaaaaacctttgngttcctgccaananttgccanggntnaatgngcctggnaacnaatcaaatntctntttttcntgggaanaattantttgccaaaaacctgntttnttntgaanttnnncctgtccccttganggggncttttntn

SEQ ID NO: 317 - DNA, 256 bp, Homo Sapiens
cgccagagagaagcagcctccggccccggcggcccctgtctcccgaccccggaaggcgaagcaggctgcccggggaccccgcgcgtgggcgcttgaagccgagaccagcctgcccgggcctgggcaggcggagcagggccttggaccccgcggcgcccctcggcctcggagcaacgagcgcagcgccgcctctgaagagccaatccattcaggatgggaaaccacgcaggcaaacgagaattaaatgccgagaagg

SEQ ID NO: 318 - DNA, 1329 bp, Homo Sapiens
  misc_feature (786)..(786): n is a, c, g, or t
  misc_feature (804)..(804): n is a, c, g, or t
  misc_feature (836)..(836): n is a, c, g, or t
  misc_feature (847)..(847): n is a, c, g, or t
  misc_feature (867)..(867): n is a, c, g, or t
  misc_feature (877)..(877): n is a, c, g, or t
  misc_feature (879)..(879): n is a, c, g, or t
  misc_feature (891)..(891): n is a, c, g, or t
  misc_feature (906)..(906): n is a, c, g, or t
  misc_feature (942)..(942): n is a, c, g, or t
  misc_feature (946)..(946): n is a, c, g, or t
  misc_feature (955)..(955): n is a, c, g, or t
  misc_feature (957)..(958): n is a, c, g, or t
  misc_feature (962)..(962): n is a, c, g, or t
  misc_feature (971)..(971): n is a, c, g, or t
  misc_feature (976)..(976): n is a, c, g, or t
  misc_feature (982)..(982): n is a, c, g, or t
  misc_feature (984)..(984): n is a, c, g, or t
  misc_feature (988)..(988): n is a, c, g, or t
  misc_feature (995)..(995): n is a, c, g, or t
  misc_feature (1004)..(1004): n is a, c, g, or t
  misc_feature (1007)..(1007): n is a, c, g, or t
  misc_feature (1014)..(1014): n is a, c, g, or t
  misc_feature (1016)..(1016): n is a, c, g, or t
  misc_feature (1020)..(1020): n is a, c, g, or t
  misc_feature (1025)..(1025): n is a, c, g, or t
  misc_feature (1028)..(1028): n is a, c, g, or t
  misc_feature (1032)..(1032): n is a, c, g, or t
  misc_feature (1051)..(1051): n is a, c, g, or t
  misc_feature (1064)..(1064): n is a, c, g, or t
  misc_feature (1071)..(1071): n is a, c, g, or t
  misc_feature (1075)..(1075): n is a, c, g, or t
  misc_feature (1078)..(1080): n is a, c, g, or t
  misc_feature (1082)..(1082): n is a, c, g, or t
  misc_feature (1086)..(1086): n is a, c, g, or t
  misc_feature (1088)..(1088): n is a, c, g, or t
  misc_feature (1091)..(1095): n is a, c, g, or t
  misc_feature (1099)..(1102): n is a, c, g, or t
  misc_feature (1104)..(1105): n is a, c, g, or t
  misc_feature (1107)..(1107): n is a, c, g, or t
  misc_feature (1110)..(1112): n is a, c, g, or t
  misc_feature (1114)..(1118): n is a, c, g, or t
  misc_feature (1121)..(1122): n is a, c, g, or t
  misc_feature (1124)..(1126): n is a, c, g, or t
  misc_feature (1128)..(1128): n is a, c, g, or t
  misc_feature (1130)..(1131): n is a, c, g, or t
  misc_feature (1137)..(1137): n is a, c, g, or t
  misc_feature (1139)..(1139): n is a, c, g, or t
  misc_feature (1142)..(1142): n is a, c, g, or t
  misc_feature (1150)..(1151): n is a, c, g, or t
  misc_feature (1158)..(1188): n is a, c, g, or t
  misc_feature (1190)..(1193): n is a, c, g, or t
  misc_feature (1195)..(1195): n is a, c, g, or t
  misc_feature (1197)..(1198): n is a, c, g, or t
  misc_feature (1204)..(1204): n is a, c, g, or t
  misc_feature (1211)..(1211): n is a, c, g, or t
  misc_feature (1215)..(1215): n is a, c, g, or t
  misc_feature (1217)..(1220): n is a, c, g, or t
  misc_feature (1224)..(1228): n is a, c, g, or t
  misc_feature (1235)..(1236): n is a, c, g, or t
  misc_feature (1239)..(1241): n is a, c, g, or t
  misc_feature (1246)..(1246): n is a, c, g, or t
  misc_feature (1251)..(1252): n is a, c, g, or t
  misc_feature (1254)..(1254): n is a, c, g, or t
  misc_feature (1257)..(1257): n is a, c, g, or t
  misc_feature (1262)..(1263): n is a, c, g, or t
  misc_feature (1265)..(1266): n is a, c, g, or t
  misc_feature (1269)..(1269): n is a, c, g, or t
  misc_feature (1271)..(1283): n is a, c, g, or t
  misc_feature (1286)..(1289): n is a, c, g, or t
  misc_feature (1292)..(1294): n is a, c, g, or t
  misc_feature (1296)..(1296): n is a, c, g, or t
  misc_feature (1298)..(1308): n is a, c, g, or t
  misc_feature (1312)..(1315): n is a, c, g, or t
  misc_feature (1317)..(1322): n is a, c, g, or t
  misc_feature (1324)..(1324): n is a, c, g, or t
  misc_feature (1326)..(1326): n is a, c, g, or t
tagagaaattactatgagaggatcgcatcaccatcaccatcacggatcctatttaggtgacactatagaatcgtcgacccacgcgtccgggctgcctggaggcagatgctcagccagcattgggcagcccccgcttcctgctcccctacccccttcacatggcagtagttctgggcaccccagcaaaccatattatgctccaggggcgcccactccaagacccctccatgggaagctggaatccctgcatggctgtgtgcaggcattgctccgggagccagcccagccagggctttgggaacagcttgggcaactgtacgagtcagagcacgatagtgaggaggccacacgctgctaccacagcgcccttcgatacggaggaagcttcgctgagctggggccccgcattggccgactgcagcaggcccagctctggaactttcatactggctcctgccagcaccgagccaaggtcctgcccccactggagcaagtgtggaacttgctacaccttgagcacaaacggaactatggagccaagcggggaggtcccccggtgaagcgagctgctgaacccccagtggtgcagcctgtgcctcctgcagcactctcaggcccctcaggggaggagggcctcagccctggaggcaagcgaaggagaggctgcaactctgaacagactggccttcccccagggctgccactgcctccaccaccattaccaccaccaccaccaccaccaccaccaccaccaccaccaccacccctgcctggcctggctaccanccccccatttcagctaancaagccagggctgtggagtaccctgcatgganatgcctggggncccaaagcgcaagggttcancaccccccanancgccaggagcancggcactcgctgccntcacccatatccatacccagctccagcgtaaaccgngcanccccctggncnncggntggtccggntgctnccccangnccangcccccnccccccaanaanaaaaaancntggntggcntgnctgncacccgtcccccggaaatnaccttaaaaaaanaaaattnaaangtnnngnatgnantcnnnnntttnnnnannanaannntnnnnnggnngnnntnanncccttncnggnccctgggnntcccggnnnnnnnnnnnnnnnnnnnnnnnnnnnnnnnannnngntnncggggnggggaancaancnnnntttnnnnnaaaaaannttnnnttttncaaanngnaanttttnngnnttnannnnnnnnnnnnnggnnnnttnnnanannnnnnnnnnntttnnnngnnnnnntngnaaa

SEQ ID NO: 319 - DNA, 1478 bp, Homo Sapiens
  misc_feature (212)..(212): n is a, c, g, or t
  misc_feature (227)..(227): n is a, c, g, or t
  misc_feature (230)..(230): n is a, c, g, or t
  misc_feature (348)..(348): n is a, c, g, or t
  misc_feature (369)..(369): n is a, c, g, or t
  misc_feature (393)..(393): n is a, c, g, or t
  misc_feature (408)..(408): n is a, c, g, or t
  misc_feature (417)..(417): n is a, c, g, or t
  misc_feature (436)..(436): n is a, c, g, or t
  misc_feature (455)..(455): n is a, c, g, or t
  misc_feature (466)..(466): n is a, c, g, or t
  misc_feature (474)..(474): n is a, c, g, or t
  misc_feature (477)..(477): n is a, c, g, or t
  misc_feature (481)..(481): n is a, c, g, or t
  misc_feature (496)..(496): n is a, c, g, or t
  misc_feature (500)..(500): n is a, c, g, or t
  misc_feature (508)..(508): n is a, c, g, or t
  misc_feature (513)..(513): n is a, c, g, or t
  misc_feature (519)..(519): n is a, c, g, or t
  misc_feature (522)..(522): n is a, c, g, or t
  misc_feature (529)..(530): n is a, c, g, or t
  misc_feature (532)..(532): n is a, c, g, or t
  misc_feature (534)..(534): n is a, c, g, or t
  misc_feature (541)..(541): n is a, c, g, or t
  misc_feature (544)..(544): n is a, c, g, or t
  misc_feature (554)..(554): n is a, c, g, or t
  misc_feature (567)..(567): n is a, c, g, or t
  misc_feature (578)..(578): n is a, c, g, or t
  misc_feature (580)..(580): n is a, c, g, or t
  misc_feature (587)..(588): n is a, c, g, or t
  misc_feature (609)..(609): n is a, c, g, or t
  misc_feature (617)..(617): n is a, c, g, or t
  misc_feature (623)..(623): n is a, c, g, or t
  misc_feature (632)..(632): n is a, c, g, or t
  misc_feature (640)..(640): n is a, c, g, or t
  misc_feature (642)..(642): n is a, c, g, or t
  misc_feature (658)..(658): n is a, c, g, or t
  misc_feature (664)..(664): n is a, c, g, or t
  misc_feature (666)..(667): n is a, c, g, or t
  misc_feature (671)..(672): n is a, c, g, or t
  misc_feature (684)..(684): n is a, c, g, or t
  misc_feature (686)..(687): n is a, c, g, or t
  misc_feature (690)..(691): n is a, c, g, or t
  misc_feature (698)..(699): n is a, c, g, or t
  misc_feature (726)..(727): n is a, c, g, or t
  misc_feature (740)..(740): n is a, c, g, or t
  misc_feature (744)..(744): n is a, c, g, or t
  misc_feature (753)..(753): n is a, c, g, or t
  misc_feature (755)..(755): n is a, c, g, or t
  misc_feature (761)..(761): n is a, c, g, or t
  misc_feature (766)..(768): n is a, c, g, or t
  misc_feature (771)..(772): n is a, c, g, or t
  misc_feature (782)..(782): n is a, c, g, or t
  misc_feature (785)..(785): n is a, c, g, or t
  misc_feature (788)..(788): n is a, c, g, or t
  misc_feature (793)..(793): n is a, c, g, or t
  misc_feature (800)..(800): n is a, c, g, or t
  misc_feature (802)..(803): n is a, c, g, or t
  misc_feature (805)..(805): n is a, c, g, or t
  misc_feature (809)..(809): n is a, c, g, or t
  misc_feature (826)..(826): n is a, c, g, or t
  misc_feature (832)..(832): n is a, c, g, or t
  misc_feature (841)..(841): n is a, c, g, or t
  misc_feature (846)..(846): n is a, c, g, or t
  misc_feature (853)..(853): n is a, c, g, or t
  misc_feature (858)..(858): n is a, c, g, or t
  misc_feature (866)..(866): n is a, c, g, or t
  misc_feature (869)..(869): n is a, c, g, or t
  misc_feature (871)..(871): n is a, c, g, or t
  misc_feature (877)..(879): n is a, c, g, or t
  misc_feature (881)..(881): n is a, c, g, or t
  misc_feature (888)..(888): n is a, c, g, or t
  misc_feature (891)..(891): n is a, c, g, or t
  misc_feature (898)..(901): n is a, c, g, or t
  misc_feature (904)..(904): n is a, c, g, or t
  misc_feature (915)..(915): n is a, c, g, or t
  misc_feature (920)..(920): n is a, c, g, or t
  misc_feature (927)..(927): n is a, c, g, or t
  misc_feature (932)..(932): n is a, c, g, or t
  misc_feature (934)..(934): n is a, c, g, or t
  misc_feature (938)..(938): n is a, c, g, or t
  misc_feature (940)..(940): n is a, c, g, or t
  misc_feature (953)..(954): n is a, c, g, or t
  misc_feature (956)..(958): n is a, c, g, or t
  misc_feature (963)..(964): n is a, c, g, or t
  misc_feature (972)..(973): n is a, c, g, or t
  misc_feature (982)..(982): n is a, c, g, or t
  misc_feature (996)..(996): n is a, c, g, or t
  misc_feature (998)..(998): n is a, c, g, or t
  misc_feature (1001)..(1001): n is a, c, g, or t
  misc_feature (1003)..(1006): n is a, c, g, or t
  misc_feature (1009)..(1009): n is a, c, g, or t
  misc_feature (1017)..(1017): n is a, c, g, or t
  misc_feature (1020)..(1022): n is a, c, g, or t
  misc_feature (1033)..(1033): n is a, c, g, or t
  misc_feature (1046)..(1046): n is a, c, g, or t
  misc_feature (1048)..(1048): n is a, c, g, or t
  misc_feature (1052)..(1052): n is a, c, g, or t
  misc_feature (1059)..(1059): n is a, c, g, or t
  misc_feature (1069)..(1070): n is a, c, g, or t
  misc_feature (1073)..(1075): n is a, c, g, or t
  misc_feature (1081)..(1081): n is a, c, g, or t
  misc_feature (1085)..(1085): n is a, c, g, or t
  misc_feature (1091)..(1092): n is a, c, g, or t
  misc_feature (1095)..(1096): n is a, c, g, or t
  misc_feature (1103)..(1103): n is a, c, g, or t
  misc_feature (1105)..(1105): n is a, c, g, or t
  misc_feature (1114)..(1116): n is a, c, g, or t
  misc_feature (1120)..(1120): n is a, c, g, or t
  misc_feature (1129)..(1130): n is a, c, g, or t
  misc_feature (1140)..(1140): n is a, c, g, or t
  misc_feature (1149)..(1149): n is a, c, g, or t
  misc_feature (1157)..(1158): n is a, c, g, or t
  misc_feature (1166)..(1166): n is a, c, g, or t
  misc_feature (1175)..(1177): n is a, c, g, or t
  misc_feature (1181)..(1181): n is a, c, g, or t
  misc_feature (1186)..(1189): n is a, c, g, or t
  misc_feature (1201)..(1201): n is a, c, g, or t
  misc_feature (1220)..(1220): n is a, c, g, or t
  misc_feature (1225)..(1226): n is a, c, g, or t
  misc_feature (1233)..(1234): n is a, c, g, or t
  misc_feature (1237)..(1237): n is a, c, g, or t
  misc_feature (1241)..(1241): n is a, c, g, or t
  misc_feature (1243)..(1243): n is a, c, g, or t
  misc_feature (1245)..(1248): n is a, c, g, or t
  misc_feature (1251)..(1253): n is a, c, g, or t
  misc_feature (1261)..(1261): n is a, c, g, or t
  misc_feature (1266)..(1266): n is a, c, g, or t
  misc_feature (1270)..(1270): n is a, c, g, or t
  misc_feature (1279)..(1279): n is a, c, g, or t
  misc_feature (1287)..(1288): n is a, c, g, or t
  misc_feature (1290)..(1290): n is a, c, g, or t
  misc_feature (1292)..(1292): n is a, c, g, or t
  misc_feature (1294)..(1295): n is a, c, g, or t
  misc_feature (1300)..(1300): n is a, c, g, or t
  misc_feature (1302)..(1302): n is a, c, g, or t
  misc_feature (1322)..(1323): n is a, c, g, or t
  misc_feature (1329)..(1330): n is a, c, g, or t
  misc_feature (1332)..(1333): n is a, c, g, or t
  misc_feature (1336)..(1336): n is a, c, g, or t
  misc_feature (1339)..(1339): n is a, c, g, or t
  misc_feature (1343)..(1343): n is a, c, g, or t
  misc_feature (1352)..(1352): n is a, c, g, or t
  misc_feature (1354)..(1354): n is a, c, g, or t
  misc_feature (1366)..(1367): n is a, c, g, or t
  misc_feature (1373)..(1374): n is a, c, g, or t
  misc_feature (1378)..(1378): n is a, c, g, or t
  misc_feature (1380)..(1380): n is a, c, g, or t
  misc_feature (1383)..(1383): n is a, c, g, or t
  misc_feature (1387)..(1387): n is a, c, g, or t
  misc_feature (1389)..(1389): n is a, c, g, or t
  misc_feature (1396)..(1396): n is a, c, g, or t
  misc_feature (1398)..(1398): n is a, c, g, or t
  misc_feature (1404)..(1404): n is a, c, g, or t
  misc_feature (1408)..(1408): n is a, c, g, or t
  misc_feature (1423)..(1423): n is a, c, g, or t
  misc_feature (1437)..(1437): n is a, c, g, or t
  misc_feature (1440)..(1440): n is a, c, g, or t
  misc_feature (1462)..(1462): n is a, c, g, or t
  misc_feature (1467)..(1467): n is a, c, g, or t
  misc_feature (1477)..(1477): n is a, c, g, or t
tagagaaaattactatgagaggatcgcatcaccactcaccatcacggatcctatttaggtgacactatagaatcgtcgacccacgcgtccggccgctgccaccgcaccccgccatggagcggccgtcgctgcgcgccctgctcctcggcgccgctgggctgctgctcctgctcctgcccctctcctcttcctcctcttcggacacctgcggnccctgcgagccggcntcntgcccgcccctgcccccgctgggctgcctgctgggcgagacccgcgacgcgtgcggttgctgccctatgtgcgcccgcggcgagggcgagccgtgcgagggtggcggcgccggcaggnggtactgcgcgccgggcatgnagtgcgtgaagagccgcaagatgnggaagggtaaagccngggcagcanccggcggtccgggtgtaancggcgtgtgcgtgtgcaanagccgctaccncggtgtgnganaacnacggcaccacctacncgancggctgtncaatntgcgcnccnccagccnnangnacgaganccncgggtaaaangccatcacccagntcagtaagggnanctgcgannaaggtccttccatagtgactncccccaangaaatntgaaatgtnaatggtgncnaagtgtacttgagctntaaatntnnttcnnaatcccgacacntnntcnncattttnnaacaaaggttaaaaagggatcacttanntagatttcaaaangaanaaaaattcntnccctgntagannnaannaaaccttggncanatnataanccaggantnngncccnataaaaagcatgaaaanaaactnggtctgggntgctngttaatnttccntcaaaaanaangnaaaatnnntnaaaaaanatngaagttnnnntgnaatacaatttnaaaangaaaaantcttnanacantnaataaaaaatatnntnnntttgnngcccttcnnttaaatacnagataaaataaagntnaangnnnnctnacttatanacnnnccagaaaaatnataaatattgatngnaaanaaatatnatcctgggannaannntatagncganttcttnnctnnaaaaaantnccttttatnnnaccnccactaaannatttaagatnaatttaaanttttttannacaaacanaaataaatnnnaaantcaannnnaaaaaaattatnaaaatttaatttatttatnttaannaatatannacntctnanannnnatnnntgctttcncctanaaanacataaaanatcagaannantncnntaatncntatattataattaaaataanncaaccnncnnctnctnaatntataatatnanaattcgataagnngcattnnaaananatnaacnanaaacatnantaattnatanacatcctaagatatnagagaaaaaatctnatnataatttataattgtatcatanatacnaataatacang

SEQ ID NO: 320 - DNA, 1280 bp, Homo Sapiens
  misc_feature (3)..(12): n is a, c, g, or t
  misc_feature (64)..(64): n is a, c, g, or t
  misc_feature (106)..(106): n is a, c, g, or t
  misc_feature (114)..(114): n is a, c, g, or t
  misc_feature (120)..(120): n is a, c, g, or t
  misc_feature (124)..(125): n is a, c, g, or t
  misc_feature (131)..(131): n is a, c, g, or t
  misc_feature (138)..(138): n is a, c, g, or t
  misc_feature (149)..(149): n is a, c, g, or t
  misc_feature (155)..(155): n is a, c, g, or t
  misc_feature (171)..(171): n is a, c, g, or t
  misc_feature (180)..(180): n is a, c, g, or t
  misc_feature (218)..(218): n is a, c, g, or t
  misc_feature (224)..(225): n is a, c, g, or t
  misc_feature (230)..(231): n is a, c, g, or t
  misc_feature (235)..(235): n is a, c, g, or t
  misc_feature (243)..(243): n is a, c, g, or t
  misc_feature (283)..(283): n is a, c, g, or t
  misc_feature (358)..(358): n is a, c, g, or t
  misc_feature (396)..(396): n is a, c, g, or t
  misc_feature (633)..(633): n is a, c, g, or t
  misc_feature (654)..(654): n is a, c, g, or t
  misc_feature (664)..(664): n is a, c, g, or t
  misc_feature (770)..(770): n is a, c, g, or t
  misc_feature (781)..(781): n is a, c, g, or t
  misc_feature (838)..(838): n is a, c, g, or t
  misc_feature (849)..(849): n is a, c, g, or t
  misc_feature (869)..(869): n is a, c, g, or t
  misc_feature (876)..(876): n is a, c, g, or t
  misc_feature (896)..(896): n is a, c, g, or t
  misc_feature (903)..(903): n is a, c, g, or t
  misc_feature (916)..(916): n is a, c, g, or t
  misc_feature (918)..(918): n is a, c, g, or t
  misc_feature (930)..(930): n is a, c, g, or t
  misc_feature (971)..(971): n is a, c, g, or t
  misc_feature (993)..(993): n is a, c, g, or t
  misc_feature (1009)..(1009): n is a, c, g, or t
  misc_feature (1012)..(1013): n is a, c, g, or t
  misc_feature (1041)..(1042): n is a, c, g, or t
  misc_feature (1045)..(1045): n is a, c, g, or t
  misc_feature (1047)..(1048): n is a, c, g, or t
  misc_feature (1078)..(1078): n is a, c, g, or t
  misc_feature (1088)..(1088): n is a, c, g, or t
  misc_feature (1090)..(1090): n is a, c, g, or t
  misc_feature (1095)..(1095): n is a, c, g, or t
  misc_feature (1108)..(1108): n is a, c, g, or t
  misc_feature (1122)..(1122): n is a, c, g, or t
  misc_feature (1133)..(1133): n is a, c, g, or t
  misc_feature (1158)..(1158): n is a, c, g, or t
  misc_feature (1164)..(1164): n is a, c, g, or t
  misc_feature (1184)..(1184): n is a, c, g, or t
  misc_feature (1193)..(1193): n is a, c, g, or t
  misc_feature (1198)..(1198): n is a, c, g, or t
  misc_feature (1213)..(1213): n is a, c, g, or t
  misc_feature (1216)..(1216): n is a, c, g, or t
  misc_feature (1229)..(1229): n is a, c, g, or t
  misc_feature (1233)..(1233): n is a, c, g, or t
  misc_feature (1235)..(1236): n is a, c, g, or t
  misc_feature (1240)..(1243): n is a, c, g, or t
  misc_feature (1246)..(1247): n is a, c, g, or t
  misc_feature (1250)..(1250): n is a, c, g, or t
  misc_feature (1255)..(1255): n is a, c, g, or t
  misc_feature (1262)..(1262): n is a, c, g, or t
  misc_feature (1264)..(1264): n is a, c, g, or t
  misc_feature (1271)..(1272): n is a, c, g, or t
  misc_feature (1279)..(1280): n is a, c, g, or t
ttnnnnnnnnnnaattagagaaaattactatggagagggatcgcatcaccatcaccatcacggnatcctatttagggtgacactatagaatcgtcgacccacgcgntccgcgtngagcanaaannctcgcntttgccnatccgtccgtnccgtcnacacctcgccgccagntcaccattngatgatgatatcgccgcgctcgttcgttcgacaacggntccggnntgtgnnaggncggcttcncgggcgacgatgccccccgggccgtcttcccctccatcgnggggcgccccaggcaccagggcgtgatggtgggcatgggtcagaaggattcctatgtgggcgacgaggcccaaancaagagaggcatcctcaccctgaagtaccccatcgagnacggcatcgtcaccaactgggacgacatggagaaaatctggcaccacaccttctacaatgagctgcgtgtggctcccgaggagcaccccgtgctgctgaccgaggcccccctgaaccccaaggccaaccgcgagaagatgacccagatcatgtttgagaccttcaacaccccagccatgtacgttgctatccaggctgtgctatccctgtacgcctctggccgtaccactggcatcntgatggactccggtgacgggntcacccacantgtgcccatctacgaggggtatgccctcccccatgccatcctgcgtctggacctggctggacgggacctgactgactacctcatgaagatcctcaccgagcgcggntacagcttcancaccacggccgagcgggaaatcgtgcgtgacattaaagagaagctgtgctacgtcgncctggacttcnagcaagagatggccaacggntgcttcnagcttcctccctggaaaaanagctacnaagctgcctgacngnccaggtcatcancattggcaatgagcggttccgctgccctgaggcactcttcnaacttccttcctgggaatggantcctggggcatccacnaannacctttaacttcttcctggagggggaannggnanntcccaaaaaacctggtaaaccaacacatgnatgtctgggngncacancaagtaccctggnttgcctaaaggaancaaaaaggaantccttgccctggcccccccccaatnaaaaanaaaatttttgttcttctganggaaaaacnccggngggaaagggggttcntcngggctccctttcncttncnnaaannnnaannagnaggantaacagncnggccccnnatacccnn

SEQ ID NO: 321 - DNA, 1324 bp, Homo Sapiens
  misc_feature (836)..(836): n is a, c, g, or t
  misc_feature (920)..(920): n is a, c, g, or t
  misc_feature (927)..(927): n is a, c, g, or t
  misc_feature (945)..(945): n is a, c, g, or t
  misc_feature (963)..(963): n is a, c, g, or t
  misc_feature (971)..(971): n is a, c, g, or t
  misc_feature (975)..(975): n is a, c, g, or t
  misc_feature (984)..(984): n is a, c, g, or t
  misc_feature (988)..(988): n is a, c, g, or t
  misc_feature (990)..(990): n is a, c, g, or t
  misc_feature (994)..(994): n is a, c, g, or t
  misc_feature (1001)..(1001): n is a, c, g, or t
  misc_feature (1006)..(1006): n is a, c, g, or t
  misc_feature (1008)..(1008): n is a, c, g, or t
  misc_feature (1012)..(1012): n is a, c, g, or t
  misc_feature (1014)..(1014): n is a, c, g, or t
  misc_feature (1017)..(1017): n is a, c, g, or t
  misc_feature (1034)..(1034): n is a, c, g, or t
  misc_feature (1063)..(1064): n is a, c, g, or t
  misc_feature (1073)..(1073): n is a, c, g, or t
  misc_feature (1076)..(1076): n is a, c, g, or t
  misc_feature (1079)..(1079): n is a, c, g, or t
  misc_feature (1087)..(1111): n is a, c, g, or t
  misc_feature (1114)..(1114): n is a, c, g, or t
  misc_feature (1118)..(1118): n is a, c, g, or t
  misc_feature (1122)..(1122): n is a, c, g, or t
  misc_feature (1125)..(1126): n is a, c, g, or t
  misc_feature (1137)..(1138): n is a, c, g, or t
  misc_feature (1140)..(1141): n is a, c, g, or t
  misc_feature (1143)..(1148): n is a, c, g, or t
  misc_feature (1152)..(1152): n is a, c, g, or t
  misc_feature (1156)..(1157): n is a, c, g, or t
  misc_feature (1160)..(1160): n is a, c, g, or t
  misc_feature (1162)..(1162): n is a, c, g, or t
  misc_feature (1164)..(1167): n is a, c, g, or t
  misc_feature (1171)..(1172): n is a, c, g, or t
  misc_feature (1175)..(1177): n is a, c, g, or t
  misc_feature (1180)..(1185): n is a, c, g, or t
  misc_feature (1187)..(1187): n is a, c, g, or t
  misc_feature (1190)..(1192): n is a, c, g, or t
  misc_feature (1195)..(1195): n is a, c, g, or t
  misc_feature (1197)..(1199): n is a, c, g, or t
  misc_feature (1209)..(1209): n is a, c, g, or t
  misc_feature (1211)..(1211): n is a, c, g, or t
  misc_feature (1218)..(1218): n is a, c, g, or t
  misc_feature (1222)..(1222): n is a, c, g, or t
  misc_feature (1230)..(1238): n is a, c, g, or t
  misc_feature (1244)..(1249): n is a, c, g, or t
  misc_feature (1253)..(1260): n is a, c, g, or t
  misc_feature (1263)..(1263): n is a, c, g, or t
  misc_feature (1265)..(1267): n is a, c, g, or t
  misc_feature (1269)..(1269): n is a, c, g, or t
  misc_feature (1273)..(1274): n is a, c, g, or t
  misc_feature (1276)..(1282): n is a, c, g, or t
  misc_feature (1285)..(1295): n is a, c, g, or t
  misc_feature (1298)..(1302): n is a, c, g, or t
  misc_feature (1307)..(1308): n is a, c, g, or t
  misc_feature (1313)..(1313): n is a, c, g, or t
  misc_feature (1316)..(1324): n is a, c, g, or t
tagagaaattactatgagaggatcgcatcaccatcaccatcacggatcctatttaggtgacactatagaatcgtcgacccacgcgtccgcgaaggagggggaggacgaggcaaagcggtatcaggagttccagaacagacaggtgcagagcctgctggagctgcgggaggcccaggtggacgcagaggcccagcggaggctggaacacctgagacaggctctgcagcggctcagggaggtcgtccttgatgcaaacacaactcagttcaagaggctgaaagagatgaacgagagggagaagaaggagctgcagaagatcctggacagaaagcgccataacagcatctcggaggccaagatgagggacaagcataagaaggaggcggaactgacggagattaaccgtcggcacatcactgagtcagtcaactccatccgtcggctggaggaggcccagaagcagcggcatgaccgtcttgtggctgggcagcagcaggtcctgcaacagctggcagaagaggagcccaagctgctggcccagctggcccaggagtgtcaggagcagcgggcgaggctcccccaggagatccgccggagcctgctgggcgagatgccggaggggctgggggacgggcctctggtggcctgtgccagcaacggtcacgcacccgggagcagcgggcacctgtcgggcgctgactcggagagccaggaggagaacacgcagctctgaactggctgagcgaggtggccacagggccagggcgggcgctgggtggagggcaggaggcaatgacactaatgctttttttttttttttttaactttttatctanaaattttatttttttaaacccggggcaagtacctcagctaactcccttcatcctcctggggcccctccttcctgccctcatctnaggttanggccttggtcaggctttnctccctgtgacccccacnccctcganctancacgtttcntccntncccnggaaaantggtngnaaantnganctccggaaatagaaccnattttttcccatccttggggatttttttnntgaaaaaantgnttncgggaaannnnnnnnnnnnnnnnnnnnnnnnnaangggncccnccnngggggcccccnnanntnnnnnnaaanttannccntnannnncccnnggnnnaannnnnncnttnnnccncnnnttttcccccncnttttttngggntttttttnnnnnnnnntttttnnnnnntttnnnnnnnnaanannngnaaanncnnnnnnnccnnnnnnnnnnnttnnnnnttttnnttttnttnnnnnnnnn

SEQ ID NO: 322 - DNA, 256 bp, Homo Sapiens
  misc_feature (6)..(6): n is a, c, g, or t
tagagnaataactatgagaggatcgcatcaccatcaccatcacggatcctatttaggtgacactatagaatcgtcgacccacgcgtccgcccacgcgtccgcccacgcgtccgcccacgcgtccgcggacgcgtgggcaagacgttatagattttactggtcatgctcttgcactttacagaactgatgattacttagatcaaccgtgttatgaaaccattaatagaattaaactttacagtgaatctttggcaag

SEQ ID NO: 323 - DNA, 1200 bp, Homo Sapiens
  misc_feature (2)..(2): n is a, c, g, or t
  misc_feature (5)..(12): n is a, c, g, or t
  misc_feature (773)..(773): n is a, c, g, or t
  misc_feature (829)..(829): n is a, c, g, or t
  misc_feature (835)..(835): n is a, c, g, or t
  misc_feature (875)..(875): n is a, c, g, or t
  misc_feature (895)..(895): n is a, c, g, or t
  misc_feature (912)..(912): n is a, c, g, or t
  misc_feature (915)..(915): n is a, c, g, or t
  misc_feature (918)..(918): n is a, c, g, or t
  misc_feature (980)..(980): n is a, c, g, or t
  misc_feature (983)..(983): n is a, c, g, or t
  misc_feature (1005)..(1005): n is a, c, g, or t
  misc_feature (1013)..(1013): n is a, c, g, or t
  misc_feature (1021)..(1021): n is a, c, g, or t
  misc_feature (1028)..(1028): n is a, c, g, or t
  misc_feature (1034)..(1034): n is a, c, g, or t
  misc_feature (1036)..(1036): n is a, c, g, or t
  misc_feature (1044)..(1044): n is a, c, g, or t
  misc_feature (1055)..(1056): n is a, c, g, or t
  misc_feature (1062)..(1062): n is a, c, g, or t
  misc_feature (1068)..(1068): n is a, c, g, or t
  misc_feature (1078)..(1078): n is a, c, g, or t
  misc_feature (1084)..(1084): n is a, c, g, or t
  misc_feature (1090)..(1090): n is a, c, g, or t
  misc_feature (1094)..(1094): n is a, c, g, or t
  misc_feature (1096)..(1097): n is a, c, g, or t
  misc_feature (1104)..(1104): n is a, c, g, or t
  misc_feature (1106)..(1106): n is a, c, g, or t
  misc_feature (1111)..(1111): n is a, c, g, or t
  misc_feature (1119)..(1120): n is a, c, g, or t
  misc_feature (1125)..(1127): n is a, c, g, or t
  misc_feature (1129)..(1129): n is a, c, g, or t
  misc_feature (1132)..(1132): n is a, c, g, or t
  misc_feature (1142)..(1142): n is a, c, g, or t
  misc_feature (1144)..(1145): n is a, c, g, or t
  misc_feature (1149)..(1149): n is a, c, g, or t
  misc_feature (1153)..(1153): n is a, c, g, or t
  misc_feature (1160)..(1160): n is a, c, g, or t
  misc_feature (1163)..(1164): n is a, c, g, or t
  misc_feature (1168)..(1168): n is a, c, g, or t
  misc_feature (1170)..(1170): n is a, c, g, or t
  misc_feature (1173)..(1173): n is a, c, g, or t
  misc_feature (1179)..(1179): n is a, c, g, or t
  misc_feature (1188)..(1188): n is a, c, g, or t
  misc_feature (1199)..(1200): n is a, c, g, or t
gnttnnnnnnnnaatagagaaattactatgagaggatcgcatcaccatcaccatcacggatcctatttaggtgacactatagaatcgtcgacccacgcgtccgcgcccaggatggcggaagtggaggcgccgacggcggccgagacggacatgaagcaatatcaaggctccggcggcgtcgccatggatgtggaacggagtcgcttcccctactgcgtggtgtggacgcccatcccggtgctcacgtggtttttccccatcatcggccacatgggcatctgcacatccacaggagtcattcgggacttcgcgggcccctactttgtctcagaggacaacatggcctttggaaagcctgccaagtactggaagttggaccctgctcaggtctatgctagcgggcccaacgcatgggacacggctgtgcacgacgcctctgaggagtacaagcaccgcatgcacaatctctgctgtgacaactgccactcgcacgtggcattggccctgaatctgatgcgctacaacaacagcaccaactggaatatggtgacgctctgcttcttctgcctgctctacgggaagtacgtcagcgttggggccttcgtgaagacctggctgcccttcatccttctcctgggcatcatcctcaccgtcagcctggtctttaacctccggtgatggctgctcggtggccccacacccaccagggtcccgaggaaacagccgccatcccttttggttccagatttttttctcctcaccccaaaaggcanggttgggcctgctgttgtggaccgggggtcggggctggcaggatggaaggactgangaccancatgaagtggggggtttgttgtctccctgcctctcaaaancaccctgtcccctcctcccnaggcctgtgactccggnccntgnaaccccctttgttcttctgttgaaaggctttggcttccctctgtaaaaactgcttcccgccnccnacctgctgggggtcctgcctcnaccccaantgcccatnatggggnaaaagnangaaatttngggcctccccnnttcaangggggnccctgggaancaaaanttggtncccnannatggggngncaccngggtaaannttaannngntcnctaaaaaccnanntttntttnagaaacnttnnccantnggncctttnaaaaagggnccaaaaagggnn

SEQ ID NO: 324 - DNA, 1245 bp, Homo Sapiens
  misc_feature (1)..(2): n is a, c, g, or t
  misc_feature (4)..(4): n is a, c, g, or t
  misc_feature (748)..(748): n is a, c, g, or t
  misc_feature (838)..(838): n is a, c, g, or t
  misc_feature (866)..(866): n is a, c, g, or t
  misc_feature (875)..(875): n is a, c, g, or t
  misc_feature (961)..(961): n is a, c, g, or t
  misc_feature (971)..(971): n is a, c, g, or t
  misc_feature (980)..(980): n is a, c, g, or t
  misc_feature (1003)..(1003): n is a, c, g, or t
  misc_feature (1013)..(1013): n is a, c, g, or t
  misc_feature (1024)..(1024): n is a, c, g, or t
  misc_feature (1033)..(1033): n is a, c, g, or t
  misc_feature (1037)..(1037): n is a, c, g, or t
  misc_feature (1057)..(1057): n is a, c, g, or t
  misc_feature (1064)..(1064): n is a, c, g, or t
  misc_feature (1066)..(1066): n is a, c, g, or t
  misc_feature (1070)..(1070): n is a, c, g, or t
  misc_feature (1083)..(1084): n is a, c, g, or t
  misc_feature (1087)..(1088): n is a, c, g, or t
  misc_feature (1098)..(1098): n is a, c, g, or t
  misc_feature (1102)..(1102): n is a, c, g, or t
  misc_feature (1124)..(1124): n is a, c, g, or t
  misc_feature (1137)..(1137): n is a, c, g, or t
  misc_feature (1147)..(1147): n is a, c, g, or t
  misc_feature (1150)..(1150): n is a, c, g, or t
  misc_feature (1158)..(1158): n is a, c, g, or t
  misc_feature (1163)..(1163): n is a, c, g, or t
  misc_feature (1166)..(1168): n is a, c, g, or t
  misc_feature (1172)..(1172): n is a, c, g, or t
  misc_feature (1181)..(1181): n is a, c, g, or t
  misc_feature (1187)..(1187): n is a, c, g, or t
  misc_feature (1191)..(1192): n is a, c, g, or t
  misc_feature (1194)..(1194): n is a, c, g, or t
  misc_feature (1199)..(1199): n is a, c, g, or t
  misc_feature (1204)..(1204): n is a, c, g, or t
  misc_feature (1209)..(1209): n is a, c, g, or t
  misc_feature (1215)..(1215): n is a, c, g, or t
  misc_feature (1218)..(1219): n is a, c, g, or t
  misc_feature (1225)..(1225): n is a, c, g, or t
  misc_feature (1230)..(1230): n is a, c, g, or t
  misc_feature (1237)..(1237): n is a, c, g, or t
nnantagagaaattactatgagaggatcgcatcaccatcaccatcacggatcctatttaggtgacactatagaatcgtcgacccacgcgtccgggctgctggcctcggggggcggcacagctgaccgctgtatccgcttctggaacacgctgacaggacaaccactgcagtgtatcgacacgggctcccaagtgtgcaatctggcctggtccaagcacgccaacgagctggtgagcacgcacggctactcacagaaccagatccttgtctggaagtacccctccctgacccaggtggccaagctgaccgggcactcctaccgcgtgctgtacctggcaatgtcccctgatggggaggccatcgtcactggtgctggagacgagaccctgaggttctggaacgtctttagcaaaacccgttcgacaaaggagtctgtgtctgtgctcaacctcttcaccaggatccggtaaacctgccgggcaggaccgtgccacaccagctgtccagagtcggaggaccccagctcctcagcttgcatggactctgccttcccagcgcttgtcccccgaggaaggcggctgggcgggcggggagctgggcctggaggatcctggagtctcattaaatgcctgattgtgaaccatgtccaccagtatctggggtgggcacgtggtcggggaccctcagcagcaggggctctgtctcccttcccaaagggcgagaaccacattggacggtcccggctcanaccgtctgtactcagagcgacggatgccccctgggaccctcactgcctccgtctgttcatcacctgcccaccggagccgcatgctcttcntggaactgcccacgtctgcacagaacanaaccaccanacgccagggctgattggtgggggcctgaaaccccggttgcccattcatggctgcaccccaccatgtcaaacccaaaaccagccccnaggccaaacnaaggcatgnaggcctgggcaggtggctcgggnccctgggcgnaaccagcctgnggatccaanaaangtccccacctgggttttcanggattcntngaancccctttggtttnnatnntccaaaaaanattntttttggaaaaatttgttttangggccatcccccnggggtcaagnggntttaaaangggcntgnnntatntggccaaangtcccntcanntngaagnagaantttgnttgganttnnccccanaaaantaaaccngaactgtt

SEQ ID NO: 325 - DNA, 256 bp, Homo Sapiens
  misc_feature (3)..(4): n is a, c, g, or t
ttnnctatgagaggtcgcatcaccatcaccatcacggatcctatttaggtgacactatagaatcgtcgacccacgcgtccgacgacgacgtgcggacgcagcggcgggggcctttcagcttatgtggagaagtcgctgtgaagccacctataaatccatttactgaatttatggagaaggctgtaaatgatggaagtcattcagaagaactcttttgccatcttaaaactatatcagagaaagaagatttaccacg

SEQ ID NO: 326 - DNA, 1238 bp, Homo Sapiens
  misc_feature (2)..(2): n is a, c, g, or t
  misc_feature (6)..(6): n is a, c, g, or t
  misc_feature (683)..(684): n is a, c, g, or t
  misc_feature (686)..(687): n is a, c, g, or t
  misc_feature (689)..(689): n is a, c, g, or t
  misc_feature (691)..(691): n is a, c, g, or t
  misc_feature (695)..(695): n is a, c, g, or t
  misc_feature (701)..(704): n is a, c, g, or t
  misc_feature (706)..(715): n is a, c, g, or t
  misc_feature (718)..(719): n is a, c, g, or t
  misc_feature (722)..(722): n is a, c, g, or t
  misc_feature (724)..(724): n is a, c, g, or t
  misc_feature (726)..(726): n is a, c, g, or t
  misc_feature (729)..(732): n is a, c, g, or t
  misc_feature (740)..(742): n is a, c, g, or t
  misc_feature (744)..(744): n is a, c, g, or t
  misc_feature (765)..(765): n is a, c, g, or t
  misc_feature (800)..(800): n is a, c, g, or t
  misc_feature (832)..(832): n is a, c, g, or t
  misc_feature (866)..(866): n is a, c, g, or t
  misc_feature (886)..(886): n is a, c, g, or t
  misc_feature (889)..(889): n is a, c, g, or t
  misc_feature (891)..(891): n is a, c, g, or t
  misc_feature (910)..(910): n is a, c, g, or t
  misc_feature (950)..(950): n is a, c, g, or t
  misc_feature (960)..(961): n is a, c, g, or t
  misc_feature (963)..(963): n is a, c, g, or t
  misc_feature (965)..(965): n is a, c, g, or t
  misc_feature (976)..(976): n is a, c, g, or t
  misc_feature (978)..(978): n is a, c, g, or t
  misc_feature (980)..(980): n is a, c, g, or t
  misc_feature (986)..(986): n is a, c, g, or t
  misc_feature (993)..(994): n is a, c, g, or t
  misc_feature (1002)..(1002): n is a, c, g, or t
  misc_feature (1004)..(1004): n is a, c, g, or t
  misc_feature (1014)..(1014): n is a, c, g, or t
  misc_feature (1017)..(1017): n is a, c, g, or t
  misc_feature (1021)..(1021): n is a, c, g, or t
  misc_feature (1025)..(1025): n is a, c, g, or t
  misc_feature (1065)..(1065): n is a, c, g, or t
  misc_feature (1072)..(1072): n is a, c, g, or t
  misc_feature (1080)..(1080): n is a, c, g, or t
  misc_feature (1098)..(1098): n is a, c, g, or t
  misc_feature (1104)..(1104): n is a, c, g, or t
  misc_feature (1132)..(1132): n is a, c, g, or t
  misc_feature (1134)..(1134): n is a, c, g, or t
  misc_feature (1137)..(1137): n is a, c, g, or t
  misc_feature (1141)..(1141): n is a, c, g, or t
  misc_feature (1145)..(1147): n is a, c, g, or t
  misc_feature (1149)..(1149): n is a, c, g, or t
  misc_feature (1151)..(1151): n is a, c, g, or t
  misc_feature (1158)..(1158): n is a, c, g, or t
  misc_feature (1166)..(1166): n is a, c, g, or t
  misc_feature (1168)..(1168): n is a, c, g, or t
  misc_feature (1175)..(1175): n is a, c, g, or t
  misc_feature (1179)..(1179): n is a, c, g, or t
  misc_feature (1190)..(1190): n is a, c, g, or t
  misc_feature (1201)..(1201): n is a, c, g, or t
  misc_feature (1207)..(1207): n is a, c, g, or t
  misc_feature (1218)..(1218): n is a, c, g, or t
  misc_feature (1220)..(1220): n is a, c, g, or t
anaatngagaaaattactatgagaggatcgcatcaccatcaccatcacggatcctatttaggtgacactatagaatcgtcgacccacgcgtccgtggcttctcatcgtctgctcctcctctgccttgctggactggtatttgtgtctgaggctggccctacgggcaccggtgaatccaagtgtcctctgatggtcaaagttctagatgctgtccgaggcagtcctgccatcaatgtggccgtgcatgtgttcagaaaggctgctgatgacacctgggagccatttgcctctgggaaaaccagtgagtctggagagctgcatgggctcacaactgaggaggaatttgtagaagggatatacaaagtggaaatagacaccaaatcttactggaaggcacttggcatctccccattccatgagcatgcagaggtggtattcacagccaacgactccggcccccgccgctacaccattgccgccctgctgagcccctactcctattccaccacggctgtcgtcaccaatcccaaggaatgagggacttctcctccagtggacctgaaggacgagggatgggatttcatgtaaccaagagtattccatttttactaaagcagtgttttcacctcatatgctatgttagaagtccaggcagagacaataaaacattcctgtgaaaggcnnannananaaanaaaaannnnannnnnnnnnnaannaanananaannnnaaaaaaannnanggggcggccgctccctatagngagtcgtattaagcttaattagctgaacttggacncctgttgaaaatccagtaatgacctcaaaacnccatctggatttgttcaaaaacgctcggttgccnccgggcgttttttatggggnganantccaagctagctgggcganattttcaggagctaagggaagctaaaatggaaaaaaaaantccctgggannancncccgtttgaantntncccaanggcatcnnaaaaaaananttttgaggcnttncagncagntgctccaatggacctaaaaccaaacgttcacctggaaatnacggccntttttaanaccggaaaaaaaaaaaancccaantttttccgggctttttttcaatttttgncnccngaanaagnnncncngaaattnctttgggnanaaaaaangggnactggggaatnggaaaagtttncccttnttaaccgtttncnaagaaaaaataaactttt

SEQ ID NO: 327 - DNA, 1198 bp, Homo Sapiens
  misc_feature (866)..(866): n is a, c, g, or t
  misc_feature (992)..(992): n is a, c, g, or t
  misc_feature (994)..(994): n is a, c, g, or t
  misc_feature (1011)..(1011): n is a, c, g, or t
  misc_feature (1016)..(1016): n is a, c, g, or t
  misc_feature (1020)..(1020): n is a, c, g, or t
  misc_feature (1026)..(1027): n is a, c, g, or t
  misc_feature (1029)..(1029): n is a, c, g, or t
  misc_feature (1048)..(1048): n is a, c, g, or t
  misc_feature (1050)..(1050): n is a, c, g, or t
  misc_feature (1057)..(1057): n is a, c, g, or t
  misc_feature (1068)..(1068): n is a, c, g, or t
  misc_feature (1075)..(1075): n is a, c, g, or t
  misc_feature (1077)..(1077): n is a, c, g, or t
  misc_feature (1081)..(1081): n is a, c, g, or t
  misc_feature (1087)..(1087): n is a, c, g, or t
  misc_feature (1095)..(1095): n is a, c, g, or t
  misc_feature (1097)..(1097): n is a, c, g, or t
  misc_feature (1102)..(1102): n is a, c, g, or t
  misc_feature (1110)..(1110): n is a, c, g, or t
  misc_feature (1127)..(1128): n is a, c, g, or t
  misc_feature (1131)..(1131): n is a, c, g, or t
  misc_feature (1133)..(1133): n is a, c, g, or t
  misc_feature (1152)..(1152): n is a, c, g, or t
  misc_feature (1156)..(1156): n is a, c, g, or t
  misc_feature (1170)..(1170): n is a, c, g, or t
  misc_feature (1176)..(1176): n is a, c, g, or t
  misc_feature (1181)..(1181): n is a, c, g, or t
  misc_feature (1183)..(1183): n is a, c, g, or t
  misc_feature (1186)..(1188): n is a, c, g, or t
  misc_feature (1194)..(1194): n is a, c, g, or t
  misc_feature (1198)..(1198): n is a, c, g, or t
tagagaaattactatgagaggatcgcatcaccatcaccatcacggatcctatttaggtgacactatagaatcgtcgacccacgcgtccgctgacatcatccagggcaagctggaccagcgaaaccagctgctggaagtggatttctgcattggccgtgacatccgaaagaaggatatcaataatattgtcaagaccctgcatgaatggtgtgatggctgtgaagcagttctactgggcatcgagcagcaagttctgagagccaaccagtacaaagagaaccacaaccgaactcagcagcaggtagaagcagaggttaccaacatcaagaagacactcaaagccaccgcatcctcctcggctcaggagatggagcagcagctggctgaacgggagtgtccccctcacgctgagcagaggcagcccaccaagaagatgtccaaagtgaaaggtctggtctccagccgccactagggccggctggggcagctggcactcaccaggcctgggtcaggtggggaggggacaccaagggcccatttcctcccctctctacctgcagtgagttccagacctgcccgtcccctcaccagcgcctccccaccctgttggtactgttccagaaaaactgttactccccctcacccactccctccttccccagttgttcccttcagactcaggggctccaccaatgccatcccaaaacagggtcagacactgcccagcttccctccaggaggttcttgtctctgtgtaagggcttgtctccctcccagtttttcttttgctccacgtcattttgtcaggctggttataagccggaggcagctttaaccagcccccagggatgattgtttgaaaggangccccttccccttgtgaaggagggggcactcctctccagcccctggtaccacagtcctcacgaatggtgcagtgatttctagccaggcgtcaagatgcgctgcttttcctctcctgcctcatcccntngttggcagctccatttnagccntggnaagganntnatttttgggcttttttttntnaaacccncgggttttttnccccttnancccncctccnatttccantnttttnaaagggcnggggtgaaaaaccctgnnatntnaaaaaaaaaaaaagggggnttgntttttttgggtggnaaaaangtttntnccnnntggggntttn

SEQ ID NO: 328 - DNA, 1322 bp, Homo Sapiens
  misc_feature (90)..(90): n is a, c, g, or t
  misc_feature (96)..(96): n is a, c, g, or t
  misc_feature (103)..(103): n is a, c, g, or t
  misc_feature (111)..(111): n is a, c, g, or t
  misc_feature (113)..(113): n is a, c, g, or t
  misc_feature (115)..(115): n is a, c, g, or t
  misc_feature (127)..(127): n is a, c, g, or t
  misc_feature (136)..(136): n is a, c, g, or t
  misc_feature (154)..(154): n is a, c, g, or t
  misc_feature (157)..(157): n is a, c, g, or t
  misc_feature (167)..(167): n is a, c, g, or t
  misc_feature (173)..(174): n is a, c, g, or t
  misc_feature (178)..(180): n is a, c, g, or t
  misc_feature (182)..(182): n is a, c, g, or t
  misc_feature (185)..(185): n is a, c, g, or t
  misc_feature (201)..(202): n is a, c, g, or t
  misc_feature (214)..(214): n is a, c, g, or t
  misc_feature (224)..(224): n is a, c, g, or t
  misc_feature (251)..(252): n is a, c, g, or t
  misc_feature (255)..(255): n is a, c, g, or t
  misc_feature (260)..(260): n is a, c, g, or t
  misc_feature (305)..(305): n is a, c, g, or t
  misc_feature (310)..(310): n is a, c, g, or t
  misc_feature (314)..(314): n is a, c, g, or t
  misc_feature (323)..(325): n is a, c, g, or t
  misc_feature (328)..(328): n is a, c, g, or t
  misc_feature (346)..(346): n is a, c, g, or t
  misc_feature (364)..(365): n is a, c, g, or t
  misc_feature (377)..(377): n is a, c, g, or t
  misc_feature (381)..(381): n is a, c, g, or t
  misc_feature (387)..(388): n is a, c, g, or t
  misc_feature (390)..(390): n is a, c, g, or t
  misc_feature (392)..(392): n is a, c, g, or t
  misc_feature (398)..(398): n is a, c, g, or t
  misc_feature (408)..(408): n is a, c, g, or t
  misc_feature (411)..(411): n is a, c, g, or t
  misc_feature (422)..(422): n is a, c, g, or t
  misc_feature (431)..(431): n is a, c, g, or t
  misc_feature (440)..(440): n is a, c, g, or t
  misc_feature (445)..(445): n is a, c, g, or t
  misc_feature (461)..(461): n is a, c, g, or t
  misc_feature (474)..(474): n is a, c, g, or t
  misc_feature (480)..(480): n is a, c, g, or t
  misc_feature (482)..(482): n is a, c, g, or t
  misc_feature (484)..(484): n is a, c, g, or t
  misc_feature (495)..(495): n is a, c, g, or t
  misc_feature (503)..(503): n is a, c, g, or t
  misc_feature (513)..(513): n is a, c, g, or t
  misc_feature (530)..(530): n is a, c, g, or t
  misc_feature (558)..(558): n is a, c, g, or t
  misc_feature (561)..(561): n is a, c, g, or t
  misc_feature (575)..(575): n is a, c, g, or t
  misc_feature (578)..(578): n is a, c, g, or t
  misc_feature (585)..(585): n is a, c, g, or t
  misc_feature (590)..(590): n is a, c, g, or t
  misc_feature (605)..(605): n is a, c, g, or t
  misc_feature (632)..(632): n is a, c, g, or t
  misc_feature (660)..(660): n is a, c, g, or t
  misc_feature (665)..(665): n is a, c, g, or t
  misc_feature (681)..(681): n is a, c, g, or t
  misc_feature (743)..(743): n is a, c, g, or t
  misc_feature (752)..(752): n is a, c, g, or t
  misc_feature (755)..(755): n is a, c, g, or t
  misc_feature (772)..(772): n is a, c, g, or t
  misc_feature (800)..(800): n is a, c, g, or t
  misc_feature (808)..(808): n is a, c, g, or t
  misc_feature (818)..(818): n is a, c, g, or t
  misc_feature (823)..(823): n is a, c, g, or t
  misc_feature (840)..(841): n is a, c, g, or t
  misc_feature (845)..(845): n is a, c, g, or t
  misc_feature (852)..(852): n is a, c, g, or t
  misc_feature (858)..(860): n is a, c, g, or t
  misc_feature (862)..(862): n is a, c, g, or t
  misc_feature (874)..(874): n is a, c, g, or t
  misc_feature (884)..(884): n is a, c, g, or t
  misc_feature (889)..(889): n is a, c, g, or t
  misc_feature (891)..(891): n is a, c, g, or t
  misc_feature (894)..(894): n is a, c, g, or t
  misc_feature (897)..(897): n is a, c, g, or t
  misc_feature (900)..(900): n is a, c, g, or t
  misc_feature (927)..(927): n is a, c, g, or t
  misc_feature (933)..(933): n is a, c, g, or t
  misc_feature (939)..(939): n is a, c, g, or t
  misc_feature (944)..(944): n is a, c, g, or t
  misc_feature (953)..(953): n is a, c, g, or t
  misc_feature (956)..(956): n is a, c, g, or t
  misc_feature (958)..(958): n is a, c, g, or t
  misc_feature (961)..(961): n is a, c, g, or t
  misc_feature (965)..(965): n is a, c, g, or t
  misc_feature (981)..(981): n is a, c, g, or t
  misc_feature (999)..(999): n is a, c, g, or t
  misc_feature (1018)..(1018): n is a, c, g, or t
  misc_feature (1027)..(1027): n is a, c, g, or t
  misc_feature (1029)..(1029): n is a, c, g, or t
  misc_feature (1032)..(1032): n is a, c, g, or t
  misc_feature (1042)..(1042): n is a, c, g, or t
  misc_feature (1045)..(1045): n is a, c, g, or t
  misc_feature (1057)..(1057): n is a, c, g, or t
  misc_feature (1070)..(1070): n is a, c, g, or t
  misc_feature (1073)..(1073): n is a, c, g, or t
  misc_feature (1077)..(1077): n is a, c, g, or t
  misc_feature (1083)..(1083): n is a, c, g, or t
  misc_feature (1092)..(1092): n is a, c, g, or t
  misc_feature (1096)..(1096): n is a, c, g, or t
  misc_feature (1098)..(1098): n is a, c, g, or t
  misc_feature (1111)..(1111): n is a, c, g, or t
  misc_feature (1116)..(1116): n is a, c, g, or t
  misc_feature (1122)..(1122): n is a, c, g, or t
  misc_feature (1126)..(1126): n is a, c, g, or t
  misc_feature (1136)..(1136): n is a, c, g, or t
  misc_feature (1145)..(1146): n is a, c, g, or t
  misc_feature (1148)..(1148): n is a, c, g, or t
  misc_feature (1160)..(1160): n is a, c, g, or t
  misc_feature (1166)..(1168): n is a, c, g, or t
  misc_feature (1173)..(1173): n is a, c, g, or t
  misc_feature (1177)..(1177): n is a, c, g, or t
  misc_feature (1181)..(1181): n is a, c, g, or t
  misc_feature (1184)..(1185): n is a, c, g, or t
  misc_feature (1189)..(1189): n is a, c, g, or t
  misc_feature (1196)..(1196): n is a, c, g, or t
  misc_feature (1200)..(1201): n is a, c, g, or t
  misc_feature (1212)..(1214): n is a, c, g, or t
  misc_feature (1216)..(1217): n is a, c, g, or t
  misc_feature (1219)..(1219): n is a, c, g, or t
  misc_feature (1221)..(1221): n is a, c, g, or t
  misc_feature (1224)..(1225): n is a, c, g, or t
  misc_feature (1231)..(1232): n is a, c, g, or t
  misc_feature (1236)..(1239): n is a, c, g, or t
  misc_feature (1245)..(1249): n is a, c, g, or t
  misc_feature (1252)..(1255): n is a, c, g, or t
  misc_feature (1258)..(1262): n is a, c, g, or t
  misc_feature (1272)..(1273): n is a, c, g, or t
  misc_feature (1275)..(1276): n is a, c, g, or t
  misc_feature (1282)..(1286): n is a, c, g, or t
  misc_feature (1295)..(1300): n is a, c, g, or t
  misc_feature (1305)..(1305): n is a, c, g, or t
  misc_feature (1308)..(1309): n is a, c, g, or t
  misc_feature (1312)..(1315): n is a, c, g, or t
  misc_feature (1317)..(1320): n is a, c, g, or t
  misc_feature (1322)..(1322): n is a, c, g, or t
tagagaaattactatgagaggatcgcatcaccatcaccatcacggatcctatttaggtgacactatagaatcgtcgacccacgcgtccgncttganggaagangaaaggananantctgctgcggcntacgctggntttgctctctttgagaanaanggagccttanctgaanngcannntntcntcccagaattggtgcnnaatggaaatgangagaatcccntcaaaaggggtctggttgctgcttacnntgntgacngtgacaatgaggaggagctggtggagagacttgagagtgaggaanagaanctanctgactggnnnaanatggcctgtctgctctgncggcgccggttcccgaannaagatgccctantcangcaccnncnantctcanaccttcacangcnaaacatggacntctaccgantatccatgntgatngagcaggagctggaanccttggagctaanggaganananatgaaataccnagaccganctgcataaanacgggagaagtacggcnttccagaacctccagagcccaagcgcangangcagtttgatgccngcnctgtganttacnagcaacccaccaaanatggcattgaccacagtaacattggcnacaagatgctgcaggccatgggctggcnggaangctctggcttgggacnaaagtgtcaaggcattacggctcccattgaagctcaagttcggctaaagggagctggcctangagcccaangcngcgcatatggtttgtcnggcgccgattcctaaaagatgctgtccngaaagccntgtttgcccngttcnctgagatggagtgaaanncacngacaaanattttnnncnggagcccaaaantggtccctcnccccnantcnctnttncccctgtctctttaaggcatgccctgngctgtnaaaaancctanggggaaccnctncnttnggcnggttccccctcccccntaaaaaattccccttagngggttgcctggggatggcntccttcccncnaangcttgggaanaanccgaaaagaagnggatttttttacnccnggtnaaaggnatgtacggnttcntngtacctagtgggnccacncccccnttcnaggttaaagngagggtttnnancaaacccccttntttttnnnttttntggnaacnggnntttntttaacnttgnnatttggaattnnncnntnantgnncttaannaacnnnnaaaaannnnnaannnnttnnnnngggccccccnngnnaaaatnnnnnggggggggnnnnnnccccnttnnaannnncnnnntn

SEQ ID NO: 329 - DNA, 1354 bp, Homo Sapiens
  misc_feature (909)..(909): n is a, c, g, or t
  misc_feature (949)..(949): n is a, c, g, or t
  misc_feature (952)..(952): n is a, c, g, or t
  misc_feature (961)..(961): n is a, c, g, or t
  misc_feature (991)..(991): n is a, c, g, or t
  misc_feature (1006)..(1006): n is a, c, g, or t
  misc_feature (1013)..(1013): n is a, c, g, or t
  misc_feature (1016)..(1016): n is a, c, g, or t
  misc_feature (1018)..(1018): n is a, c, g, or t
  misc_feature (1021)..(1021): n is a, c, g, or t
  misc_feature (1028)..(1028): n is a, c, g, or t
  misc_feature (1037)..(1037): n is a, c, g, or t
  misc_feature (1048)..(1049): n is a, c, g, or t
  misc_feature (1055)..(1055): n is a, c, g, or t
  misc_feature (1057)..(1057): n is a, c, g, or t
  misc_feature (1061)..(1061): n is a, c, g, or t
  misc_feature (1069)..(1069): n is a, c, g, or t
  misc_feature (1080)..(1080): n is a, c, g, or t
  misc_feature (1083)..(1083): n is a, c, g, or t
  misc_feature (1089)..(1089): n is a, c, g, or t
  misc_feature (1100)..(1100): n is a, c, g, or t
  misc_feature (1102)..(1102): n is a, c, g, or t
  misc_feature (1109)..(1109): n is a, c, g, or t
  misc_feature (1113)..(1113): n is a, c, g, or t
  misc_feature (1115)..(1115): n is a, c, g, or t
  misc_feature (1118)..(1119): n is a, c, g, or t
  misc_feature (1124)..(1124): n is a, c, g, or t
  misc_feature (1128)..(1128): n is a, c, g, or t
  misc_feature (1130)..(1130): n is a, c, g, or t
  misc_feature (1135)..(1135): n is a, c, g, or t
  misc_feature (1138)..(1139): n is a, c, g, or t
  misc_feature (1144)..(1144): n is a, c, g, or t
  misc_feature (1156)..(1156): n is a, c, g, or t
  misc_feature (1160)..(1160): n is a, c, g, or t
  misc_feature (1164)..(1164): n is a, c, g, or t
  misc_feature (1168)..(1169): n is a, c, g, or t
  misc_feature (1173)..(1174): n is a, c, g, or t
  misc_feature (1182)..(1182): n is a, c, g, or t
  misc_feature (1187)..(1187): n is a, c, g, or t
  misc_feature (1189)..(1190): n is a, c, g, or t
  misc_feature (1194)..(1195): n is a, c, g, or t
  misc_feature (1199)..(1199): n is a, c, g, or t
  misc_feature (1201)..(1202): n is a, c, g, or t
  misc_feature (1204)..(1204): n is a, c, g, or t
  misc_feature (1210)..(1210): n is a, c, g, or t
  misc_feature (1213)..(1213): n is a, c, g, or t
  misc_feature (1218)..(1219): n is a, c, g, or t
  misc_feature (1221)..(1221): n is a, c, g, or t
  misc_feature (1223)..(1223): n is a, c, g, or t
  misc_feature (1227)..(1227): n is a, c, g, or t
  misc_feature (1237)..(1237): n is a, c, g, or t
  misc_feature (1243)..(1244): n is a, c, g, or t
  misc_feature (1246)..(1249): n is a, c, g, or t
  misc_feature (1252)..(1252): n is a, c, g, or t
  misc_feature (1257)..(1257): n is a, c, g, or t
  misc_feature (1265)..(1266): n is a, c, g, or t
  misc_feature (1270)..(1270): n is a, c, g, or t
  misc_feature (1276)..(1276): n is a, c, g, or t
  misc_feature (1283)..(1283): n is a, c, g, or t
  misc_feature (1286)..(1286): n is a, c, g, or t
  misc_feature (1289)..(1289): n is a, c, g, or t
  misc_feature (1291)..(1291): n is a, c, g, or t
  misc_feature (1296)..(1297): n is a, c, g, or t
  misc_feature (1300)..(1301): n is a, c, g, or t
  misc_feature (1305)..(1305): n is a, c, g, or t
  misc_feature (1313)..(1313): n is a, c, g, or t
  misc_feature (1315)..(1318): n is a, c, g, or t
  misc_feature (1320)..(1320): n is a, c, g, or t
  misc_feature (1322)..(1323): n is a, c, g, or t
  misc_feature (1328)..(1329): n is a, c, g, or t
  misc_feature (1335)..(1341): n is a, c, g, or t
  misc_feature (1354)..(1354): n is a, c, g, or t
tagagaaattactatgagaggatcgcatcaccatcaccatcacggatcctatttaggtgacactatagaatcgtcgacccacgcgtccgccaggacgcacgggcatggggaccccggggagccagatggcccccgtgagcctgaatgtgccccgacccaaccaggtgagcgggcccgtcatgcccagcatgcctcccgggcagtggcagcaggcgccccttccccagcagcagcccatgccaggcttgcccaggcctgtgatatccatgcaggcccaggcggccgtggctgggccccggatgcccagcgtgcagccacccaggagcatctcacccagcgctctgcaagacctgctgcggaccctgaagtcgcccagctcccctcagcagcaacagcaggtgctgaacattctcaaatcaaacccgcagctaatggcagctttcatcaaacagcgcacagccaagtacgtggccaatcagcccggcatgcagccccagcctggcctccagtcccagcccggcatgcaaccccagcctggcatgcaccagcagcccagcctgcagaacctgaatgccatgcaggctggcgtgccgcggcccggtgtgcctccacagcagcaggcgatgggaggcctgaacccccagggccaggccttgaacatcatgaacccaggacacaaccccaacatggcgagtatgaatccacagtaccgagaaatgttacggaggcagctgctgcagcagcagcagcaacagcagcagcaacaacagcagcaacagcagcagcagcaagggagtgccggcatggctgggggcatggcggggcacggccagttccagcagcctcaaggacccggaagctacccaccggccatgcagcagcagcagcgcatgcagcagcatctccccntccagggcagctccatgggccagatggcggctcaaatggnaancttggccanatggggcaacccggggctgggggcaaaaancacccccaaatccancaagccntgnancancggattntgcagcaanagcaaatgaannaccaantnggtncccaggcnagccaaacccnganccccanaaaaaatgttntnaagaaancaangnctnnattcntggnanaaatnccnntcttnaaaaaagggggnttcnaccntttnntttnngggccatncaacntnnattnnccgntnnangaaaanccnctttnnanantttnccaaaggttncccccnnannnntcnggggnttttatannaatnggaacnaaaaaangtnccntnaaccnnaanntttnaatttttngnnnngnannaaaanngggggnnnnnnnttttttttttttn

SEQ ID NO: 330 - DNA, 256 bp, Homo Sapiens
  misc_feature (2)..(2): n is a, c, g, or t
  misc_feature (4)..(4): n is a, c, g, or t
  misc_feature (110)..(111): n is a, c, g, or t
  misc_feature (123)..(123): n is a, c, g, or t
  misc_feature (127)..(127): n is a, c, g, or t
  misc_feature (129)..(129): n is a, c, g, or t
  misc_feature (135)..(135): n is a, c, g, or t
  misc_feature (137)..(137): n is a, c, g, or t
  misc_feature (144)..(144): n is a, c, g, or t
  misc_feature (146)..(146): n is a, c, g, or t
  misc_feature (151)..(152): n is a, c, g, or t
  misc_feature (157)..(157): n is a, c, g, or t
  misc_feature (159)..(160): n is a, c, g, or t
  misc_feature (167)..(167): n is a, c, g, or t
  misc_feature (195)..(196): n is a, c, g, or t
  misc_feature (204)..(204): n is a, c, g, or t
  misc_feature (211)..(211): n is a, c, g, or t
  misc_feature (221)..(221): n is a, c, g, or t
  misc_feature (227)..(227): n is a, c, g, or t
  misc_feature (230)..(231): n is a, c, g, or t
  misc_feature (243)..(243): n is a, c, g, or t
  misc_feature (247)..(248): n is a, c, g, or t
  misc_feature (253)..(253): n is a, c, g, or t
tnanaggagaattaactatgagaggatcgcatcaccatcaccatcacggatcctatttaggtgacactatagaatcgtcgacccacgcgtccgacctgaaataccctganngaatacatcaangccngnggcctncnacgggancngagtnntaccncnnctgagcncctccaccacatttgccagtctggaacnnaagaaccnagagtgngcgtgctctngaacanganntgctcaataacntctnnaattngca

SEQ ID NO: 331 - DNA, 1391 bp, Homo Sapiens
  misc_feature (604)..(604): n is a, c, g, or t
  misc_feature (650)..(650): n is a, c, g, or t
  misc_feature (653)..(653): n is a, c, g, or t
  misc_feature (672)..(672): n is a, c, g, or t
  misc_feature (691)..(691): n is a, c, g, or t
  misc_feature (694)..(694): n is a, c, g, or t
  misc_feature (698)..(698): n is a, c, g, or t
  misc_feature (701)..(701): n is a, c, g, or t
  misc_feature (705)..(705): n is a, c, g, or t
  misc_feature (723)..(723): n is a, c, g, or t
  misc_feature (733)..(733): n is a, c, g, or t
  misc_feature (739)..(740): n is a, c, g, or t
  misc_feature (746)..(746): n is a, c, g, or t
  misc_feature (750)..(751): n is a, c, g, or t
  misc_feature (759)..(759): n is a, c, g, or t
  misc_feature (794)..(794): n is a, c, g, or t
  misc_feature (799)..(799): n is a, c, g, or t
  misc_feature (817)..(817): n is a, c, g, or t
  misc_feature (824)..(824): n is a, c, g, or t
  misc_feature (829)..(830): n is a, c, g, or t
  misc_feature (833)..(833): n is a, c, g, or t
  misc_feature (838)..(838): n is a, c, g, or t
  misc_feature (849)..(849): n is a, c, g, or t
  misc_feature (886)..(887): n is a, c, g, or t
  misc_feature (891)..(891): n is a, c, g, or t
  misc_feature (913)..(913): n is a, c, g, or t
  misc_feature (922)..(922): n is a, c, g, or t
  misc_feature (930)..(930): n is a, c, g, or t
  misc_feature (936)..(936): n is a, c, g, or t
  misc_feature (946)..(946): n is a, c, g, or t
  misc_feature (961)..(961): n is a, c, g, or t
  misc_feature (969)..(969): n is a, c, g, or t
  misc_feature (971)..(971): n is a, c, g, or t
  misc_feature (975)..(975): n is a, c, g, or t
  misc_feature (979)..(981): n is a, c, g, or t
  misc_feature (983)..(983): n is a, c, g, or t
  misc_feature (985)..(985): n is a, c, g, or t
  misc_feature (987)..(988): n is a, c, g, or t
  misc_feature (991)..(991): n is a, c, g, or t
  misc_feature (993)..(994): n is a, c, g, or t
  misc_feature (996)..(996): n is a, c, g, or t
  misc_feature (999)..(999): n is a, c, g, or t
  misc_feature (1007)..(1007): n is a, c, g, or t
  misc_feature (1009)..(1014): n is a, c, g, or t
  misc_feature (1019)..(1021): n is a, c, g, or t
  misc_feature (1033)..(1035): n is a, c, g, or t
  misc_feature (1037)..(1037): n is a, c, g, or t
  misc_feature (1039)..(1039): n is a, c, g, or t
  misc_feature (1048)..(1051): n is a, c, g, or t
  misc_feature (1054)..(1055): n is a, c, g, or t
  misc_feature (1058)..(1060): n is a, c, g, or t
  misc_feature (1064)..(1065): n is a, c, g, or t
  misc_feature (1069)..(1069): n is a, c, g, or t
  misc_feature (1072)..(1073): n is a, c, g, or t
  misc_feature (1078)..(1079): n is a, c, g, or t
  misc_feature (1082)..(1082): n is a, c, g, or t
  misc_feature (1088)..(1088): n is a, c, g, or t
  misc_feature (1090)..(1091): n is a, c, g, or t
  misc_feature (1101)..(1105): n is a, c, g, or t
  misc_feature (1107)..(1109): n is a, c, g, or t
  misc_feature (1112)..(1112): n is a, c, g, or t
  misc_feature (1116)..(1116): n is a, c, g, or t
  misc_feature (1119)..(1119): n is a, c, g, or t
  misc_feature (1122)..(1122): n is a, c, g, or t
  misc_feature (1125)..(1126): n is a, c, g, or t
  misc_feature (1134)..(1134): n is a, c, g, or t
  misc_feature (1136)..(1136): n is a, c, g, or t
  misc_feature (1138)..(1141): n is a, c, g, or t
  misc_feature (1146)..(1146): n is a, c, g, or t
  misc_feature (1155)..(1155): n is a, c, g, or t
  misc_feature (1157)..(1157): n is a, c, g, or t
  misc_feature (1164)..(1164): n is a, c, g, or t
  misc_feature (1168)..(1170): n is a, c, g, or t
  misc_feature (1173)..(1173): n is a, c, g, or t
  misc_feature (1176)..(1176): n is a, c, g, or t
  misc_feature (1178)..(1179): n is a, c, g, or t
  misc_feature (1182)..(1182): n is a, c, g, or t
  misc_feature (1187)..(1189): n is a, c, g, or t
  misc_feature (1191)..(1192): n is a, c, g, or t
  misc_feature (1198)..(1198): n is a, c, g, or t
  misc_feature (1203)..(1203): n is a, c, g, or t
  misc_feature (1205)..(1205): n is a, c, g, or t
  misc_feature (1208)..(1208): n is a, c, g, or t
  misc_feature (1211)..(1211): n is a, c, g, or t
  misc_feature (1215)..(1217): n is a, c, g, or t
  misc_feature (1219)..(1220): n is a, c, g, or t
  misc_feature (1223)..(1225): n is a, c, g, or t
  misc_feature (1229)..(1229): n is a, c, g, or t
  misc_feature (1231)..(1231): n is a, c, g, or t
  misc_feature (1234)..(1235): n is a, c, g, or t
  misc_feature (1241)..(1241): n is a, c, g, or t
  misc_feature (1243)..(1244): n is a, c, g, or t
  misc_feature (1247)..(1248): n is a, c, g, or t
  misc_feature (1250)..(1251): n is a, c, g, or t
  misc_feature (1255)..(1256): n is a, c, g, or t
  misc_feature (1259)..(1261): n is a, c, g, or t
  misc_feature (1267)..(1267): n is a, c, g, or t
  misc_feature (1270)..(1271): n is a, c, g, or t
  misc_feature (1275)..(1275): n is a, c, g, or t
  misc_feature (1280)..(1280): n is a, c, g, or t
  misc_feature (1282)..(1282): n is a, c, g, or t
  misc_feature (1287)..(1290): n is a, c, g, or t
  misc_feature (1292)..(1292): n is a, c, g, or t
  misc_feature (1295)..(1295): n is a, c, g, or t
  misc_feature (1297)..(1297): n is a, c, g, or t
  misc_feature (1299)..(1300): n is a, c, g, or t
  misc_feature (1302)..(1302): n is a, c, g, or t
  misc_feature (1304)..(1305): n is a, c, g, or t
  misc_feature (1308)..(1310): n is a, c, g, or t
  misc_feature (1312)..(1317): n is a, c, g, or t
  misc_feature (1320)..(1321): n is a, c, g, or t
  misc_feature (1326)..(1326): n is a, c, g, or t
  misc_feature (1328)..(1329): n is a, c, g, or t
  misc_feature (1332)..(1332): n is a, c, g, or t
  misc_feature (1335)..(1335): n is a, c, g, or t
  misc_feature (1337)..(1337): n is a, c, g, or t
  misc_feature (1339)..(1342): n is a, c, g, or t
  misc_feature (1345)..(1345): n is a, c, g, or t
  misc_feature (1347)..(1349): n is a, c, g, or t
  misc_feature (1351)..(1353): n is a, c, g, or t
  misc_feature (1355)..(1355): n is a, c, g, or t
  misc_feature (1357)..(1361): n is a, c, g, or t
  misc_feature (1364)..(1364): n is a, c, g, or t
  misc_feature (1366)..(1368): n is a, c, g, or t
  misc_feature (1371)..(1375): n is a, c, g, or t
  misc_feature (1377)..(1382): n is a, c, g, or t
  misc_feature (1385)..(1385): n is a, c, g, or t
  misc_feature (1388)..(1388): n is a, c, g, or t
tagagaaattactatgagaggatcgcatcaccatcaccatcacggatcctatttaggtgacactatagaatcgtcgacccacgcgtccgcgggcggcggcggagcgggcggcggagcggcggcagcagcggtgagcgcgagccccggagccccgggcggccggcctcccgcgcccgcgcagccccgcgtctgcgtccggccggagacgccgggccccgcgccgcgccgcgccatgtcggtgaacatggacgagctgcggcaccaggtcatgatcaaccagttcgtgctggccgcgggctgcgcggccgaccaggcgaagcagttgctgcaggcggcccactggcagttcgagaccgcgctgagcacgttcttccaagaaaccaacattcccaacagccaccaccaccaccagatgatgtgcactcccagcaacacccctgccacgccgcccaacttccccgatgcgctggccatgttctccaagctccgcgcctccgagggcctgcagagcagcaacagccccatgacagccgcagcctgctccccacctgcaaacttcagccccttctgggcctcgtccccgcccagccaccaggcgccctgnatcccgccctcctcccccaccaccttccaccacctccaccgcccanagnccaagtggcccccaggatnacagcatgggggcgcccancanaaanccntggnggccatggacggccaaanattaaactgnacgccnnctggcnctgnntggaaatngggtgcacccctaggtttgtggggaacacagtaanggtcnatgggaggggggaacccngggaagngctannggnttttnccaaaaatccnctggaaaaaattttttaaaaaaaatttttgtggggtnngggnaaaaaaaaaaattttccttganccaattggnttcttttnaaaaanttttttaggnaaatttttttccttntttttttnanattntaannnanananntantnnanttnataaaatntnnnnnnatttnnnttaaaaaatggnnntnanaaaacttannnntannttnnntaannttancanntttannaantttaananntatttttttnnnnnannngtntttnttnatnttnntttttttnanannnnaattntttttaatntntaaaaanaaannnttnttntnnttntttannnanntaaaanttttntnttntantatnnntnnaannntatntnaanntttttntnnaannanntttnntannnttattntannttanattantntattnnnnanttntntnntnanntannntnnnnnntannatttnannaanaantntnnnntantnnntnnntntnnnnntanannnaannnnntnnnnnntantantaa

SEQ ID NO: 332 - DNA, 1394 bp, Homo Sapiens
  misc_feature (554)..(554): n is a, c, g, or t
  misc_feature (628)..(628): n is a, c, g, or t
  misc_feature (652)..(652): n is a, c, g, or t
  misc_feature (683)..(683): n is a, c, g, or t
  misc_feature (735)..(735): n is a, c, g, or t
  misc_feature (899)..(899): n is a, c, g, or t
  misc_feature (913)..(913): n is a, c, g, or t
  misc_feature (929)..(929): n is a, c, g, or t
  misc_feature (932)..(932): n is a, c, g, or t
  misc_feature (942)..(944): n is a, c, g, or t
  misc_feature (948)..(948): n is a, c, g, or t
  misc_feature (959)..(959): n is a, c, g, or t
  misc_feature (963)..(963): n is a, c, g, or t
  misc_feature (969)..(969): n is a, c, g, or t
  misc_feature (998)..(998): n is a, c, g, or t
  misc_feature (1000)..(1000): n is a, c, g, or t
  misc_feature (1006)..(1006): n is a, c, g, or t
  misc_feature (1008)..(1008): n is a, c, g, or t
  misc_feature (1018)..(1018): n is a, c, g, or t
  misc_feature (1031)..(1031): n is a, c, g, or t
  misc_feature (1033)..(1033): n is a, c, g, or t
  misc_feature (1038)..(1039): n is a, c, g, or t
  misc_feature (1047)..(1047): n is a, c, g, or t
  misc_feature (1049)..(1049): n is a, c, g, or t
  misc_feature (1054)..(1054): n is a, c, g, or t
  misc_feature (1059)..(1059): n is a, c, g, or t
  misc_feature (1072)..(1072): n is a, c, g, or t
  misc_feature (1076)..(1076): n is a, c, g, or t
  misc_feature (1083)..(1083): n is a, c, g, or t
  misc_feature (1090)..(1090): n is a, c, g, or t
  misc_feature (1098)..(1098): n is a, c, g, or t
  misc_feature (1103)..(1103): n is a, c, g, or t
  misc_feature (1106)..(1106): n is a, c, g, or t
  misc_feature (1109)..(1110): n is a, c, g, or t
  misc_feature (1119)..(1120): n is a, c, g, or t
  misc_feature (1130)..(1130): n is a, c, g, or t
  misc_feature (1134)..(1134): n is a, c, g, or t
  misc_feature (1141)..(1141): n is a, c, g, or t
  misc_feature (1154)..(1154): n is a, c, g, or t
  misc_feature (1161)..(1161): n is a, c, g, or t
  misc_feature (1167)..(1167): n is a, c, g, or t
  misc_feature (1174)..(1176): n is a, c, g, or t
  misc_feature (1179)..(1179): n is a, c, g, or t
  misc_feature (1185)..(1185): n is a, c, g, or t
  misc_feature (1187)..(1187): n is a, c, g, or t
  misc_feature (1197)..(1197): n is a, c, g, or t
  misc_feature (1211)..(1213): n is a, c, g, or t
  misc_feature (1221)..(1222): n is a, c, g, or t
  misc_feature (1224)..(1225): n is a, c, g, or t
  misc_feature (1229)..(1229): n is a, c, g, or t
  misc_feature (1232)..(1233): n is a, c, g, or t
  misc_feature (1252)..(1252): n is a, c, g, or t
  misc_feature (1263)..(1263): n is a, c, g, or t
  misc_feature (1266)..(1268): n is a, c, g, or t
  misc_feature (1271)..(1271): n is a, c, g, or t
  misc_feature (1277)..(1277): n is a, c, g, or t
  misc_feature (1281)..(1284): n is a, c, g, or t
  misc_feature (1286)..(1286): n is a, c, g, or t
  misc_feature (1289)..(1289): n is a, c, g, or t
  misc_feature (1291)..(1291): n is a, c, g, or t
  misc_feature (1295)..(1295): n is a, c, g, or t
  misc_feature (1299)..(1300): n is a, c, g, or t
  misc_feature (1303)..(1305): n is a, c, g, or t
  misc_feature (1308)..(1309): n is a, c, g, or t
  misc_feature (1311)..(1311): n is a, c, g, or t
  misc_feature (1314)..(1314): n is a, c, g, or t
  misc_feature (1316)..(1317): n is a, c, g, or t
  misc_feature (1320)..(1320): n is a, c, g, or t
  misc_feature (1324)..(1325): n is a, c, g, or t
  misc_feature (1327)..(1328): n is a, c, g, or t
  misc_feature (1333)..(1337): n is a, c, g, or t
  misc_feature (1339)..(1341): n is a, c, g, or t
  misc_feature (1344)..(1344): n is a, c, g, or t
  misc_feature (1347)..(1347): n is a, c, g, or t
  misc_feature (1349)..(1349): n is a, c, g, or t
  misc_feature (1351)..(1351): n is a, c, g, or t
  misc_feature (1361)..(1363): n is a, c, g, or t
  misc_feature (1366)..(1367): n is a, c, g, or t
  misc_feature (1372)..(1373): n is a, c, g, or t
  misc_feature (1383)..(1386): n is a, c, g, or t
  misc_feature (1394)..(1394): n is a, c, g, or t
atagagagattactatgagaggatcgcatcaccatcaccatcacggatcctatttaggtgacactatagaatcgtcgacccacgcgtccgggggtaccttcccaggctgcctggctgaccagctggttttaaagcgccggggtaaccagttggagatctgtgccgtggtcctgaggcagttgtctccacacaagtactacttcctcgtgggctacagtgaaactttgctgtcctacttttacaaatgtcctgtgcgactccacctccaaactgtgccctcaaaggttgtgtataagtacctctagaacaatccccttttttccatcaagctgtagcctgcagagaatggaaacgtgggaaaggaatggtatgtgggggaaatgcatcccctcagaggactgaggcatagtctctcatctgctattgaataaagaccttctatcacaaaaaaaaaaaaaaaaaaaaaaaaaaaaaaaaaaaaaaaaaaagggcggccgctccctatagtgagtcgtattaagcttaattagctgagcttggactcctgttgatanatccagtaatgacctcaaaactccatctggatttgttcaaaacgctcggttgccgccgggcgttttttattggngagaatccaagctagcttggcganattttcaggagctaaggaagctaaaatgganaaaaaaatcactggatataccaccgttgatatatcccaatggcatcgtaaanaacattttgaggcatttcagtcagttgctcaatgtacctataaccaaaccgttcagctggatattacggcctttttaaagaccgtaaagaaaaataagcacaagttttatccggcctttattcacattcttgcccgcctgataaatgctcatccggaatttccntatggcaatgaaanaacggtgaaactgggnganatgggaaaannnttcncccttgttaanccgnttttcnatgaaccaaactgaaaacgttttcctccncnctggangngaaaaccccnaaaaatttccggncnttttnnaaacaaanantcccnaaaanggggcgggttaangggnaaaaccntggcccnatttcccnaaaanggnttnntgaaaaaannttttttcccncccncccaaancccgggggggaanttccccnattttnatttaannnggncaaaangnaaatttcctnccccccttttcccnnngggaaaannannccanggnnaaagggttaaaccccgggnaatcggttcanagnnnttngaaggntccnnnncnaangntaanaatnnaannncgnnanaangnnggngggnnannttttnnnnntnnnggnccnananccggggaaannnccnntgggnnaaaaaaaagnnnnaaaaaggn

SEQ ID NO: 333 - DNA, 871 bp, Homo Sapiens
  misc_feature (793)..(793): n is a, c, g, or t
  misc_feature (798)..(802): n is a, c, g, or t
  misc_feature (808)..(860): n is a, c, g, or t
  misc_feature (871)..(871): n is a, c, g, or t
tagagaaattactatgagaggatcgcatcaccatcaccatcacggatcctatttaggtgacactatagaatcgtcgacccacgcgtccgctgtagccggaccctttgccttcgccactgctcagcgtctgcacatccctacaatggctaaaacagcaatggcctacaaggaaaaaatgaaggagctgtccatgctgtcactgatctgctcttgcttttacccggaacctcgcaacatcaacatctatacttacgatgatatggaagtgaagcaaatcaacaaacgtgcctctggccaggcttttgagctgatcttgaagccaccatctcctatctcagaagccccacgaactttagcttctccaaagaagaaagacctgtccctggaggagatccagaagaaactggaggctgcagaggaaagaagaaagtctcaggaggcccaggtgctgaaacaattggcagagaagagggaacacgagcgagaagtccttcagaaggctttggaggagaacaacaacttcagcaagatggcggaggaaaagctgatcctgaaaatggaacaaattaaggaaaaccgtgaggctaatctagctgctattattgaacgtctgcaggaaaaggagaggcatgctgcggaggtgcgcaggaacaaggaactccaggttgaactgtctggctgaagcaagggagggtctggcacgccccaccaatagtaaatccccctgcctatattataatggatcatgcgatatcaggatggggaatgtatgacatggtttaaaaagaactcnttatnnnnnaaaaannnnnnnnnnnnnnnnnnnnnnnnnnnnnnnnnnnnnnnnnnnnnnnnnnnnnggggggccgcn

SEQ ID NO: 334 - DNA, 256 bp, Homo Sapiens
ccgaggaaagggaggcaggggaggtggagctcatgggagttctggccctgagcaaagaggagcaggagaggagcctggaggcaggtcccaggcacgcggggtctgtaaagcctgaggcctccgaggccttcccaggagcctgggaaaaccgcacgagaaaggacatggagagaggaaatactcaggaggatgcggccgatggcgagcagcgggaggaggaggagactgcgggaggccagaccctggcggctgaggc

SEQ ID NO: 335 - DNA, 256 bp, Homo Sapiens
  misc_feature (1)..(1): n is a, c, g, or t
  misc_feature (16)..(16): n is a, c, g, or t
  misc_feature (18)..(18): n is a, c, g, or t
  misc_feature (30)..(30): n is a, c, g, or t
  misc_feature (40)..(40): n is a, c, g, or t
  misc_feature (50)..(50): n is a, c, g, or t
  misc_feature (53)..(53): n is a, c, g, or t
  misc_feature (67)..(69): n is a, c, g, or t
  misc_feature (72)..(72): n is a, c, g, or t
  misc_feature (76)..(76): n is a, c, g, or t
  misc_feature (83)..(84): n is a, c, g, or t
  misc_feature (89)..(89): n is a, c, g, or t
  misc_feature (118)..(119): n is a, c, g, or t
  misc_feature (148)..(148): n is a, c, g, or t
  misc_feature (156)..(156): n is a, c, g, or t
  misc_feature (161)..(161): n is a, c, g, or t
  misc_feature (238)..(238): n is a, c, g, or t
  misc_feature (249)..(249): n is a, c, g, or t
  misc_feature (252)..(252): n is a, c, g, or t
nagccccaattattgngnccaaatttttcnatgagaggtntccacaaccnaancatcacggattttnnntangggncactccnnaaaanccgacccacgcgtccgcccacgcgtccgnngacgcttttttctccacggggggggcccngtccccanaaaanatgaggagaaatccaagatgctggcccgcctgctgaagagctcccatcccgaagacctccgcgcagccaataagctnatcaaagaganggngcag

SEQ ID NO: 336 - DNA, 1402 bp, Homo Sapiens
  misc_feature (965)..(965): n is a, c, g, or t
  misc_feature (978)..(978): n is a, c, g, or t
  misc_feature (998)..(998): n is a, c, g, or t
  misc_feature (1004)..(1004): n is a, c, g, or t
  misc_feature (1009)..(1009): n is a, c, g, or t
  misc_feature (1025)..(1025): n is a, c, g, or t
  misc_feature (1035)..(1035): n is a, c, g, or t
  misc_feature (1043)..(1043): n is a, c, g, or t
  misc_feature (1048)..(1048): n is a, c, g, or t
  misc_feature (1050)..(1050): n is a, c, g, or t
  misc_feature (1053)..(1053): n is a, c, g, or t
  misc_feature (1061)..(1061): n is a, c, g, or t
  misc_feature (1065)..(1065): n is a, c, g, or t
  misc_feature (1068)..(1068): n is a, c, g, or t
  misc_feature (1075)..(1075): n is a, c, g, or t
  misc_feature (1107)..(1107): n is a, c, g, or t
  misc_feature (1117)..(1117): n is a, c, g, or t
  misc_feature (1131)..(1131): n is a, c, g, or t
  misc_feature (1136)..(1136): n is a, c, g, or t
  misc_feature (1140)..(1140): n is a, c, g, or t
  misc_feature (1142)..(1142): n is a, c, g, or t
  misc_feature (1145)..(1145): n is a, c, g, or t
  misc_feature (1150)..(1150): n is a, c, g, or t
  misc_feature (1154)..(1154): n is a, c, g, or t
  misc_feature (1158)..(1158): n is a, c, g, or t
  misc_feature (1162)..(1162): n is a, c, g, or t
  misc_feature (1168)..(1168): n is a, c, g, or t
  misc_feature (1172)..(1172): n is a, c, g, or t
  misc_feature (1180)..(1180): n is a, c, g, or t
  misc_feature (1183)..(1183): n is a, c, g, or t
  misc_feature (1193)..(1194): n is a, c, g, or t
  misc_feature (1201)..(1201): n is a, c, g, or t
  misc_feature (1219)..(1219): n is a, c, g, or t
  misc_feature (1240)..(1240): n is a, c, g, or t
  misc_feature (1246)..(1246): n is a, c, g, or t
  misc_feature (1248)..(1248): n is a, c, g, or t
  misc_feature (1261)..(1261): n is a, c, g, or t
  misc_feature (1263)..(1263): n is a, c, g, or t
  misc_feature (1272)..(1272): n is a, c, g, or t
  misc_feature (1278)..(1278): n is a, c, g, or t
  misc_feature (1280)..(1280): n is a, c, g, or t
  misc_feature (1296)..(1296): n is a, c, g, or t
  misc_feature (1300)..(1300): n is a, c, g, or t
  misc_feature (1305)..(1305): n is a, c, g, or t
  misc_feature (1314)..(1314): n is a, c, g, or t
  misc_feature (1316)..(1316): n is a, c, g, or t
  misc_feature (1323)..(1323): n is a, c, g, or t
  misc_feature (1325)..(1325): n is a, c, g, or t
  misc_feature (1335)..(1335): n is a, c, g, or t
  misc_feature (1337)..(1337): n is a, c, g, or t
  misc_feature (1341)..(1341): n is a, c, g, or t
  misc_feature (1364)..(1364): n is a, c, g, or t
  misc_feature (1366)..(1366): n is a, c, g, or t
  misc_feature (1376)..(1377): n is a, c, g, or t
  misc_feature (1388)..(1388): n is a, c, g, or t
  misc_feature (1391)..(1391): n is a, c, g, or t
  misc_feature (1396)..(1396): n is a, c, g, or t
  misc_feature (1401)..(1402): n is a, c, g, or t
tagagaaattaactatggagaggatcgcatcaccatcaccatcacggatcctatttaggtgacactatagaatcgtcgacccacgcgtccggtgaatccttctcaggccaagcagaatccactaaagggaaaaaggaaagaaactctcaaaaatgttcctttctctgaacttaacttaaagaagaaaaaggggaaaacttccactcctcgtggtgttgagggagaactatcttttgtgacattggatgagattggggaagaggaagatgcagctgcacatctagcacaagctctagtcactgtggatgaagtaattgatgaagaagaactaaatatggaagaaatggtaaaaaattcaaattcactttttacattagatgaattaattgaccaagatgattgcatttcccacagtgaacctaaagatgttactgttctgtcagtggctgaagaacaagatctcctcaaacaggaacgcttggtaactgtggatgaaattggagaagtggaagagctacctttgaatgagtcagcagacataacttttgccactttaaatactaaaggaaatgaaggagatactgtaagggattccattggcttcatttcttctcaggtgcccgaagacccttctactttagttactgtagatgaaatacaagatgacagcagtgatttgcatttagtgactttggatgaagtaactgaagaggatgaagactctctggcggattttaacaaccttaaagaagagcttaattttgttactgttgatgaagttggagaggaggaagatggagataatgatttaaaagttgagttagcacaaagcaaaaatgaccatcccacagataaaaaagggaatagaaagaagagagctgtggacacaaaaaaagacaaaacttgaatccttgtcccaagtgggtccagtaatgagaatgttatggaagaagatctaaaaaccntgattgaaagacncttacagctaaactccaccnagagantagantgggaaaactctgccntccaaaaaancctgttgngaccnanccnccaaaggngaanagnccttccnaaagatggagttgatgaggaatctggattaanggattccaanccgagcgaaacccnagaanactnanacnctctnccgncaantcanggcccngagncccggagnaanaactttctgnnccaaggnggatctccgcccattgtncccccccccccgggaaaccangcaaancngcaaaaacccccnancaaaactgnaattcngnccccaaaaggaaaggncaangggcnaaaaaaccntnggtgggnanaaatcccaantntggnccgtttgtttttttttttttttntncaaaaattgnnaatttttcccnaanagggnaaagnn

SEQ ID NO: 337 - DNA, 256 bp, Homo Sapiens
ccacagccgagcagctggcccagattgcagcggagaacgaggaggatgagcactcggtcaactacaagcccccggcccagaagagcatccaggagatccaggagctggacaaggacgacgagagcctgcgaaagtacaaggaggccctgctgggccgcgtggccgtttccgcagaccccaacgtccccaacgtcgtggtgactggcctgaccctggtgtgcagctcggccccgggccccctggagctggacctgac

SEQ ID NO: 338 - DNA, 1200 bp, Homo Sapiens
  misc_feature (1)..(1): n is a, c, g, or t
  misc_feature (783)..(783): n is a, c, g, or t
  misc_feature (832)..(832): n is a, c, g, or t
  misc_feature (834)..(834): n is a, c, g, or t
  misc_feature (845)..(845): n is a, c, g, or t
  misc_feature (847)..(847): n is a, c, g, or t
  misc_feature (873)..(873): n is a, c, g, or t
  misc_feature (914)..(914): n is a, c, g, or t
  misc_feature (919)..(919): n is a, c, g, or t
  misc_feature (947)..(947): n is a, c, g, or t
  misc_feature (949)..(949): n is a, c, g, or t
  misc_feature (988)..(988): n is a, c, g, or t
  misc_feature (992)..(992): n is a, c, g, or t
  misc_feature (997)..(997): n is a, c, g, or t
  misc_feature (1004)..(1004): n is a, c, g, or t
  misc_feature (1008)..(1008): n is a, c, g, or t
  misc_feature (1019)..(1019): n is a, c, g, or t
  misc_feature (1035)..(1035): n is a, c, g, or t
  misc_feature (1040)..(1040): n is a, c, g, or t
  misc_feature (1042)..(1043): n is a, c, g, or t
  misc_feature (1045)..(1045): n is a, c, g, or t
  misc_feature (1049)..(1049): n is a, c, g, or t
  misc_feature (1053)..(1053): n is a, c, g, or t
  misc_feature (1063)..(1063): n is a, c, g, or t
  misc_feature (1070)..(1070): n is a, c, g, or t
  misc_feature (1073)..(1073): n is a, c, g, or t
  misc_feature (1085)..(1086): n is a, c, g, or t
  misc_feature (1089)..(1089): n is a, c, g, or t
  misc_feature (1091)..(1091): n is a, c, g, or t
  misc_feature (1100)..(1100): n is a, c, g, or t
  misc_feature (1107)..(1108): n is a, c, g, or t
  misc_feature (1112)..(1112): n is a, c, g, or t
  misc_feature (1120)..(1120): n is a, c, g, or t
  misc_feature (1122)..(1122): n is a, c, g, or t
  misc_feature (1125)..(1125): n is a, c, g, or t
  misc_feature (1129)..(1130): n is a, c, g, or t
  misc_feature (1135)..(1135): n is a, c, g, or t
  misc_feature (1140)..(1140): n is a, c, g, or t
  misc_feature (1142)..(1143): n is a, c, g, or t
  misc_feature (1147)..(1147): n is a, c, g, or t
  misc_feature (1151)..(1151): n is a, c, g, or t
  misc_feature (1155)..(1156): n is a, c, g, or t
  misc_feature (1160)..(1160): n is a, c, g, or t
  misc_feature (1163)..(1163): n is a, c, g, or t
  misc_feature (1168)..(1168): n is a, c, g, or t
  misc_feature (1171)..(1171): n is a, c, g, or t
  misc_feature (1173)..(1176): n is a, c, g, or t
  misc_feature (1179)..(1179): n is a, c, g, or t
  misc_feature (1181)..(1183): n is a, c, g, or t
  misc_feature (1187)..(1188): n is a, c, g, or t
  misc_feature (1192)..(1194): n is a, c, g, or t
  misc_feature (1196)..(1196): n is a, c, g, or t
  misc_feature (1200)..(1200): n is a, c, g, or t
nttagagaaattactatgagaggatcgcatcaccatcaccatcacggatcctatttaggtgacactatagaatcgtcgacccacgcgtccggctggatccgcgcacacccagtggcggcggatgggcggccggggcggccggggcggccggtcctgagcgcggcccgggctgtcagggctggctgctggcgggatggacaccctggaggaggtgacttgggccaatgggagcacagcgctacccccacccctggcaccaaacatcagtgtgcctcatcgctgcctgctgctgctctacgaagacattggcacctccagggtccggtactgggacctcttgctgctcatccccaatgtgctcttcctcatcttcctgctctggaagcttccatctgctcgggcgaagatccgcatcacctccagccccatttttatcaccttctacatcctggtgtttgtggtggcgctggtgggcattgcccgggccgtggtatccatgacggtgagcacctcgaacgctgcaactgttgctgataagatcctgtgggagatcacccgcttcttcctgctggccatcgagctgagtgtgatcatcctgggcctggcctttggccacctggagagtaagtccagcatcaagcgggtgctggccatcaccacagtgctgtccctggcctactctgtcacccaggggaccctggagatcctgtaccctgatgcccatctctcagctgaggactttaatatctatggccatgggggccgccagttctggctggtcanctcctgcttcttcttcctggtctactctctggtggtcatccttcccaanancccgctgaagnancgcatctccctgccttctcggaagancttctacgtgtatgcgggcatcctggcactgctcaacctantgcangggctggggaatgtgctgctgtgcttcnanatcatcaaggggctctgctgtgtaaatgcaaaaaccttnctgnaattnaactttnttcnctccgctcatntaagtggctttcctcnggggntnntncggntcgnaacccaaaancttcttntcntaaaatgccaanntgnanaaaaaaaanaaccaanntaancctacccnanccntaanntttgncccgncnnaagncctnaaanntcanggnttttnggncnnnnttncnnntatnnaaannnantttn

SEQ ID NO: 339 - DNA, 2127 bp, Homo Sapiens
  misc_feature (2)..(3): n is a, c, g, or t
  misc_feature (15)..(15): n is a, c, g, or t
  misc_feature (17)..(17): n is a, c, g, or t
  misc_feature (21)..(21): n is a, c, g, or t
  misc_feature (26)..(26): n is a, c, g, or t
  misc_feature (34)..(34): n is a, c, g, or t
  misc_feature (44)..(46): n is a, c, g, or t
  misc_feature (52)..(52): n is a, c, g, or t
  misc_feature (59)..(59): n is a, c, g, or t
  misc_feature (61)..(61): n is a, c, g, or t
  misc_feature (63)..(63): n is a, c, g, or t
  misc_feature (72)..(73): n is a, c, g, or t
  misc_feature (79)..(80): n is a, c, g, or t
  misc_feature (99)..(99): n is a, c, g, or t
  misc_feature (104)..(104): n is a, c, g, or t
  misc_feature (113)..(113): n is a, c, g, or t
  misc_feature (116)..(116): n is a, c, g, or t
  misc_feature (118)..(118): n is a, c, g, or t
  misc_feature (127)..(127): n is a, c, g, or t
  misc_feature (133)..(133): n is a, c, g, or t
  misc_feature (135)..(135): n is a, c, g, or t
  misc_feature (138)..(139): n is a, c, g, or t
  misc_feature (143)..(143): n is a, c, g, or t
  misc_feature (149)..(149): n is a, c, g, or t
  misc_feature (158)..(158): n is a, c, g, or t
  misc_feature (162)..(162): n is a, c, g, or t
  misc_feature (164)..(165): n is a, c, g, or t
  misc_feature (183)..(184): n is a, c, g, or t
  misc_feature (190)..(190): n is a, c, g, or t
  misc_feature (192)..(192): n is a, c, g, or t
  misc_feature (194)..(194): n is a, c, g, or t
  misc_feature (198)..(199): n is a, c, g, or t
  misc_feature (201)..(202): n is a, c, g, or t
  misc_feature (204)..(204): n is a, c, g, or t
  misc_feature (210)..(210): n is a, c, g, or t
  misc_feature (212)..(212): n is a, c, g, or t
  misc_feature (221)..(223): n is a, c, g, or t
  misc_feature (228)..(229): n is a, c, g, or t
  misc_feature (233)..(233): n is a, c, g, or t
  misc_feature (237)..(237): n is a, c, g, or t
  misc_feature (240)..(241): n is a, c, g, or t
  misc_feature (247)..(247): n is a, c, g, or t
  misc_feature (266)..(266): n is a, c, g, or t
  misc_feature (269)..(269): n is a, c, g, or t
  misc_feature (280)..(280): n is a, c, g, or t
  misc_feature (283)..(284): n is a, c, g, or t
  misc_feature (297)..(297): n is a, c, g, or t
  misc_feature (299)..(299): n is a, c, g, or t
  misc_feature (301)..(304): n is a, c, g, or t
  misc_feature (308)..(309): n is a, c, g, or t
  misc_feature (311)..(313): n is a, c, g, or t
  misc_feature (318)..(318): n is a, c, g, or t
  misc_feature (323)..(323): n is a, c, g, or t
  misc_feature (332)..(332): n is a, c, g, or t
  misc_feature (337)..(337): n is a, c, g, or t
  misc_feature (340)..(340): n is a, c, g, or t
  misc_feature (342)..(342): n is a, c, g, or t
  misc_feature (349)..(350): n is a, c, g, or t
  misc_feature (353)..(354): n is a, c, g, or t
  misc_feature (356)..(357): n is a, c, g, or t
  misc_feature (362)..(362): n is a, c, g, or t
  misc_feature (364)..(364): n is a, c, g, or t
  misc_feature (367)..(367): n is a, c, g, or t
  misc_feature (371)..(371): n is a, c, g, or t
  misc_feature (373)..(373): n is a, c, g, or t
  misc_feature (375)..(376): n is a, c, g, or t
  misc_feature (378)..(379): n is a, c, g, or t
  misc_feature (383)..(386): n is a, c, g, or t
  misc_feature (389)..(389): n is a, c, g, or t
  misc_feature (391)..(393): n is a, c, g, or t
  misc_feature (397)..(397): n is a, c, g, or t
  misc_feature (402)..(402): n is a, c, g, or t
  misc_feature (404)..(404): n is a, c, g, or t
  misc_feature (406)..(406): n is a, c, g, or t
  misc_feature (408)..(408): n is a, c, g, or t
  misc_feature (412)..(412): n is a, c, g, or t
  misc_feature (415)..(415): n is a, c, g, or t
  misc_feature (418)..(418): n is a, c, g, or t
  misc_feature (422)..(422): n is a, c, g, or t
  misc_feature (427)..(427): n is a, c, g, or t
  misc_feature (429)..(430): n is a, c, g, or t
  misc_feature (434)..(434): n is a, c, g, or t
  misc_feature (437)..(437): n is a, c, g, or t
  misc_feature (439)..(441): n is a, c, g, or t
  misc_feature (443)..(443): n is a, c, g, or t
  misc_feature (445)..(446): n is a, c, g, or t
  misc_feature (448)..(449): n is a, c, g, or t
  misc_feature (451)..(451): n is a, c, g, or t
  misc_feature (453)..(453): n is a, c, g, or t
  misc_feature (456)..(456): n is a, c, g, or t
  misc_feature (458)..(458): n is a, c, g, or t
  misc_feature (460)..(460): n is a, c, g, or t
  misc_feature (464)..(464): n is a, c, g, or t
  misc_feature (467)..(468): n is a, c, g, or t
  misc_feature (470)..(470): n is a, c, g, or t
  misc_feature (482)..(483): n is a, c, g, or t
  misc_feature (485)..(485): n is a, c, g, or t
  misc_feature (487)..(489): n is a, c, g, or t
  misc_feature (491)..(491): n is a, c, g, or t
  misc_feature (494)..(496): n is a, c, g, or t
  misc_feature (501)..(501): n is a, c, g, or t
  misc_feature (505)..(506): n is a, c, g, or t
  misc_feature (513)..(513): n is a, c, g, or t
  misc_feature (518)..(519): n is a, c, g, or t
  misc_feature (522)..(522): n is a, c, g, or t
  misc_feature (524)..(524): n is a, c, g, or t
  misc_feature (527)..(527): n is a, c, g, or t
  misc_feature (531)..(533): n is a, c, g, or t
  misc_feature (537)..(537): n is a, c, g, or t
  misc_feature (540)..(544): n is a, c, g, or t
  misc_feature (547)..(548): n is a, c, g, or t
  misc_feature (552)..(553): n is a, c, g, or t
  misc_feature (555)..(557): n is a, c, g, or t
  misc_feature (559)..(560): n is a, c, g, or t
  misc_feature (564)..(564): n is a, c, g, or t
  misc_feature (566)..(566): n is a, c, g, or t
  misc_feature (569)..(571): n is a, c, g, or t
  misc_feature (573)..(573): n is a, c, g, or t
  misc_feature (579)..(579): n is a, c, g, or t
  misc_feature (583)..(584): n is a, c, g, or t
  misc_feature (592)..(592): n is a, c, g, or t
  misc_feature (597)..(597): n is a, c, g, or t
  misc_feature (600)..(600): n is a, c, g, or t
  misc_feature (602)..(602): n is a, c, g, or t
  misc_feature (604)..(604): n is a, c, g, or t
  misc_feature (606)..(607): n is a, c, g, or t
  misc_feature (610)..(612): n is a, c, g, or t
  misc_feature (615)..(615): n is a, c, g, or t
  misc_feature (617)..(618): n is a, c, g, or t
  misc_feature (620)..(620): n is a, c, g, or t
  misc_feature (624)..(624): n is a, c, g, or t
  misc_feature (628)..(628): n is a, c, g, or t
  misc_feature (634)..(635): n is a, c, g, or t
  misc_feature (637)..(637): n is a, c, g, or t
  misc_feature (645)..(645): n is a, c, g, or t
  misc_feature (647)..(647): n is a, c, g, or t
  misc_feature (650)..(651): n is a, c, g, or t
  misc_feature (653)..(654): n is a, c, g, or t
  misc_feature (663)..(663): n is a, c, g, or t
  misc_feature (668)..(668): n is a, c, g, or t
  misc_feature (670)..(670): n is a, c, g, or t
  misc_feature (673)..(673): n is a, c, g, or t
  misc_feature (676)..(676): n is a, c, g, or t
  misc_feature (678)..(678): n is a, c, g, or t
  misc_feature (685)..(685): n is a, c, g, or t
  misc_feature (689)..(690): n is a, c, g, or t
  misc_feature (693)..(694): n is a, c, g, or t
  misc_feature (702)..(702): n is a, c, g, or t
  misc_feature (705)..(705): n is a, c, g, or t
  misc_feature (708)..(708): n is a, c, g, or t
  misc_feature (710)..(711): n is a, c, g, or t
  misc_feature (716)..(716): n is a, c, g, or t
  misc_feature (718)..(718): n is a, c, g, or t
  misc_feature (723)..(723): n is a, c, g, or t
  misc_feature (730)..(730): n is a, c, g, or t
  misc_feature (732)..(733): n is a, c, g, or t
  misc_feature (736)..(736): n is a, c, g, or t
  misc_feature (739)..(741): n is a, c, g, or t
  misc_feature (743)..(744): n is a, c, g, or t
  misc_feature (755)..(755): n is a, c, g, or t
  misc_feature (757)..(758): n is a, c, g, or t
  misc_feature (765)..(765): n is a, c, g, or t
  misc_feature (767)..(768): n is a, c, g, or t
  misc_feature (770)..(772): n is a, c, g, or t
  misc_feature (774)..(774): n is a, c, g, or t
  misc_feature (779)..(780): n is a, c, g, or t
  misc_feature (783)..(783): n is a, c, g, or t
  misc_feature (786)..(788): n is a, c, g, or t
  misc_feature (794)..(794): n is a, c, g, or t
  misc_feature (798)..(798): n is a, c, g, or t
  misc_feature (800)..(800): n is a, c, g, or t
  misc_feature (813)..(813): n is a, c, g, or t
  misc_feature (815)..(815): n is a, c, g, or t
  misc_feature (818)..(818): n is a, c, g, or t
  misc_feature (821)..(821): n is a, c, g, or t
  misc_feature (823)..(823): n is a, c, g, or t
  misc_feature (826)..(828): n is a, c, g, or t
  misc_feature (830)..(831): n is a, c, g, or t
  misc_feature (833)..(833): n is a, c, g, or t
  misc_feature (836)..(837): n is a, c, g, or t
  misc_feature (840)..(840): n is a, c, g, or t
  misc_feature (843)..(844): n is a, c, g, or t
  misc_feature (846)..(847): n is a, c, g, or t
  misc_feature (855)..(857): n is a, c, g, or t
  misc_feature (859)..(859): n is a, c, g, or t
  misc_feature (861)..(861): n is a, c, g, or t
  misc_feature (865)..(867): n is a, c, g, or t
  misc_feature (869)..(871): n is a, c, g, or t
  misc_feature (873)..(878): n is a, c, g, or t
  misc_feature (881)..(882): n is a, c, g, or t
  misc_feature (885)..(885): n is a, c, g, or t
  misc_feature (887)..(887): n is a, c, g, or t
  misc_feature (890)..(891): n is a, c, g, or t
  misc_feature (895)..(895): n is a, c, g, or t
  misc_feature (902)..(902): n is a, c, g, or t
  misc_feature (906)..(906): n is a, c, g, or t
  misc_feature (908)..(909): n is a, c, g, or t
  misc_feature (911)..(913): n is a, c, g, or t
  misc_feature (915)..(915): n is a, c, g, or t
  misc_feature (917)..(917): n is a, c, g, or t
  misc_feature (920)..(920): n is a, c, g, or t
  misc_feature (927)..(927): n is a, c, g, or t
  misc_feature (929)..(930): n is a, c, g, or t
  misc_feature (934)..(934): n is a, c, g, or t
  misc_feature (936)..(936): n is a, c, g, or t
  misc_feature (938)..(939): n is a, c, g, or t
  misc_feature (944)..(944): n is a, c, g, or t
  misc_feature (948)..(948): n is a, c, g, or t
  misc_feature (955)..(955): n is a, c, g, or t
  misc_feature (958)..(958): n is a, c, g, or t
  misc_feature (962)..(963): n is a, c, g, or t
  misc_feature (969)..(970): n is a, c, g, or t
  misc_feature (972)..(972): n is a, c, g, or t
  misc_feature (974)..(974): n is a, c, g, or t
  misc_feature (977)..(977): n is a, c, g, or t
  misc_feature (982)..(982): n is a, c, g, or t
  misc_feature (987)..(987): n is a, c, g, or t
  misc_feature (994)..(994): n is a, c, g, or t
  misc_feature (996)..(996): n is a, c, g, or t
  misc_feature (999)..(999): n is a, c, g, or t
  misc_feature (1002)..(1003): n is a, c, g, or t
  misc_feature (1009)..(1010): n is a, c, g, or t
  misc_feature (1014)..(1015): n is a, c, g, or t
  misc_feature (1020)..(1020): n is a, c, g, or t
  misc_feature (1023)..(1023): n is a, c, g, or t
  misc_feature (1025)..(1029): n is a, c, g, or t
  misc_feature (1031)..(1031): n is a, c, g, or t
  misc_feature (1033)..(1036): n is a, c, g, or t
  misc_feature (1042)..(1043): n is a, c, g, or t
  misc_feature (1046)..(1046): n is a, c, g, or t
  misc_feature (1048)..(1049): n is a, c, g, or t
  misc_feature (1053)..(1053): n is a, c, g, or t
  misc_feature (1055)..(1055): n is a, c, g, or t
  misc_feature (1058)..(1060): n is a, c, g, or t
  misc_feature (1065)..(1065): n is a, c, g, or t
  misc_feature (1068)..(1068): n is a, c, g, or t
  misc_feature (1070)..(1070): n is a, c, g, or t
  misc_feature (1075)..(1076): n is a, c, g, or t
  misc_feature (1078)..(1079): n is a, c, g, or t
  misc_feature (1084)..(1084): n is a, c, g, or t
  misc_feature (1089)..(1090): n is a, c, g, or t
  misc_feature (1093)..(1095): n is a, c, g, or t
  misc_feature (1100)..(1100): n is a, c, g, or t
  misc_feature (1105)..(1105): n is a, c, g, or t
  misc_feature (1107)..(1107): n is a, c, g, or t
  misc_feature (1109)..(1109): n is a, c, g, or t
  misc_feature (1111)..(1113): n is a, c, g, or t
  misc_feature (1118)..(1119): n is a, c, g, or t
  misc_feature (1121)..(1121): n is a, c, g, or t
  misc_feature (1126)..(1126): n is a, c, g, or t
  misc_feature (1129)..(1131): n is a, c, g, or t
  misc_feature (1134)..(1136): n is a, c, g, or t
  misc_feature (1139)..(1139): n is a, c, g, or t
  misc_feature (1142)..(1142): n is a, c, g, or t
  misc_feature (1145)..(1145): n is a, c, g, or t
  misc_feature (1152)..(1152): n is a, c, g, or t
  misc_feature (1154)..(1154): n is a, c, g, or t
  misc_feature (1156)..(1156): n is a, c, g, or t
  misc_feature (1164)..(1165): n is a, c, g, or t
  misc_feature (1168)..(1168): n is a, c, g, or t
  misc_feature (1175)..(1175): n is a, c, g, or t
  misc_feature (1180)..(1181): n is a, c, g, or t
  misc_feature (1186)..(1186): n is a, c, g, or t
  misc_feature (1191)..(1191): n is a, c, g, or t
  misc_feature (1193)..(1193): n is a, c, g, or t
  misc_feature (1198)..(1199): n is a, c, g, or t
  misc_feature (1206)..(1208): n is a, c, g, or t
  misc_feature (1212)..(1212): n is a, c, g, or t
  misc_feature (1214)..(1214): n is a, c, g, or t
  misc_feature (1216)..(1216): n is a, c, g, or t
  misc_feature (1220)..(1222): n is a, c, g, or t
  misc_feature (1228)..(1228): n is a, c, g, or t
  misc_feature (1230)..(1230): n is a, c, g, or t
  misc_feature (1232)..(1235): n is a, c, g, or t
  misc_feature (1239)..(1240): n is a, c, g, or t
  misc_feature (1243)..(1243): n is a, c, g, or t
  misc_feature (1246)..(1247): n is a, c, g, or t
  misc_feature (1249)..(1250): n is a, c, g, or t
  misc_feature (1253)..(1255): n is a, c, g, or t
  misc_feature (1259)..(1260): n is a, c, g, or t
  misc_feature (1264)..(1264): n is a, c, g, or t
  misc_feature (1267)..(1267): n is a, c, g, or t
  misc_feature (1270)..(1270): n is a, c, g, or t
  misc_feature (1277)..(1277): n is a, c, g, or t
  misc_feature (1280)..(1281): n is a, c, g, or t
  misc_feature (1287)..(1290): n is a, c, g, or t
  misc_feature (1292)..(1292): n is a, c, g, or t
  misc_feature (1294)..(1294): n is a, c, g, or t
  misc_feature (1300)..(1300): n is a, c, g, or t
  misc_feature (1302)..(1302): n is a, c, g, or t
  misc_feature (1305)..(1306): n is a, c, g, or t
  misc_feature (1311)..(1311): n is a, c, g, or t
  misc_feature (1318)..(1318): n is a, c, g, or t
  misc_feature (1328)..(1328): n is a, c, g, or t
  misc_feature (1330)..(1331): n is a, c, g, or t
  misc_feature (1336)..(1336): n is a, c, g, or t
  misc_feature (1339)..(1339): n is a, c, g, or t
  misc_feature (1341)..(1341): n is a, c, g, or t
  misc_feature (1345)..(1345): n is a, c, g, or t
  misc_feature (1349)..(1349): n is a, c, g, or t
  misc_feature (1351)..(1351): n is a, c, g, or t
  misc_feature (1354)..(1355): n is a, c, g, or t
  misc_feature (1358)..(1358): n is a, c, g, or t
  misc_feature (1361)..(1362): n is a, c, g, or t
  misc_feature (1365)..(1365): n is a, c, g, or t
  misc_feature (1368)..(1368): n is a, c, g, or t
  misc_feature (1370)..(1370): n is a, c, g, or t
  misc_feature (1372)..(1372): n is a, c, g, or t
  misc_feature (1375)..(1375): n is a, c, g, or t
  misc_feature (1380)..(1383): n is a, c, g, or t
  misc_feature (1385)..(1385): n is a, c, g, or t
  misc_feature (1387)..(1388): n is a, c, g, or t
  misc_feature (1391)..(1391): n is a, c, g, or t
  misc_feature (1397)..(1397): n is a, c, g, or t
  misc_feature (1400)..(1400): n is a, c, g, or t
  misc_feature (1409)..(1409): n is a, c, g, or t
  misc_feature (1412)..(1412): n is a, c, g, or t
  misc_feature (1417)..(1418): n is a, c, g, or t
  misc_feature (1422)..(1423): n is a, c, g, or t
  misc_feature (1428)..(1428): n is a, c, g, or t
  misc_feature (1432)..(1432): n is a, c, g, or t
  misc_feature (1435)..(1436): n is a, c, g, or t
  misc_feature (1439)..(1439): n is a, c, g, or t
  misc_feature (1444)..(1445): n is a, c, g, or t
  misc_feature (1450)..(1450): n is a, c, g, or t
  misc_feature (1453)..(1453): n is a, c, g, or t
  misc_feature (1457)..(1457): n is a, c, g, or t
  misc_feature (1463)..(1465): n is a, c, g, or t
  misc_feature (1473)..(1473): n is a, c, g, or t
  misc_feature (1477)..(1477): n is a, c, g, or t
  misc_feature (1479)..(1479): n is a, c, g, or t
  misc_feature (1481)..(1482): n is a, c, g, or t
  misc_feature (1484)..(1485): n is a, c, g, or t
  misc_feature (1488)..(1488): n is a, c, g, or t
  misc_feature (1490)..(1491): n is a, c, g, or t
  misc_feature (1514)..(1515): n is a, c, g, or t
  misc_feature (1522)..(1523): n is a, c, g, or t
  misc_feature (1533)..(1535): n is a, c, g, or t
  misc_feature (1544)..(1544): n is a, c, g, or t
  misc_feature (1546)..(1546): n is a, c, g, or t
  misc_feature (1552)..(1555): n is a, c, g, or t
  misc_feature (1557)..(1557): n is a, c, g, or t
  misc_feature (1559)..(1560): n is a, c, g, or t
  misc_feature (1569)..(1570): n is a, c, g, or t
  misc_feature (1573)..(1573): n is a, c, g, or t
  misc_feature (1575)..(1575): n is a, c, g, or t
  misc_feature (1578)..(1580): n is a, c, g, or t
  misc_feature (1582)..(1583): n is a, c, g, or t
  misc_feature (1593)..(1597): n is a, c, g, or t
  misc_feature (1603)..(1604): n is a, c, g, or t
  misc_feature (1606)..(1606): n is a, c, g, or t
  misc_feature (1609)..(1610): n is a, c, g, or t
  misc_feature (1612)..(1612): n is a, c, g, or t
  misc_feature (1616)..(1616): n is a, c, g, or t
  misc_feature (1618)..(1618): n is a, c, g, or t
  misc_feature (1625)..(1625): n is a, c, g, or t
  misc_feature (1633)..(1634): n is a, c, g, or t
  misc_feature (1637)..(1637): n is a, c, g, or t
  misc_feature (1639)..(1639): n is a, c, g, or t
  misc_feature (1650)..(1650): n is a, c, g, or t
  misc_feature (1654)..(1654): n is a, c, g, or t
  misc_feature (1659)..(1659): n is a, c, g, or t
  misc_feature (1663)..(1663): n is a, c, g, or t
  misc_feature (1667)..(1667): n is a, c, g, or t
  misc_feature (1674)..(1678): n is a, c, g, or t
  misc_feature (1681)..(1681): n is a, c, g, or t
  misc_feature (1690)..(1690): n is a, c, g, or t
  misc_feature (1692)..(1692): n is a, c, g, or t
  misc_feature (1695)..(1695): n is a, c, g, or t
  misc_feature (1697)..(1700): n is a, c, g, or t
  misc_feature (1704)..(1706): n is a, c, g, or t
  misc_feature (1708)..(1709): n is a, c, g, or t
  misc_feature (1711)..(1711): n is a, c, g, or t
  misc_feature (1718)..(1718): n is a, c, g, or t
  misc_feature (1720)..(1721): n is a, c, g, or t
  misc_feature (1725)..(1725): n is a, c, g, or t
  misc_feature (1732)..(1732): n is a, c, g, or t
  misc_feature (1735)..(1735): n is a, c, g, or t
  misc_feature (1739)..(1739): n is a, c, g, or t
  misc_feature (1741)..(1741): n is a, c, g, or t
  misc_feature (1743)..(1744): n is a, c, g, or t
  misc_feature (1751)..(1751): n is a, c, g, or t
  misc_feature (1753)..(1754): n is a, c, g, or t
  misc_feature (1757)..(1757): n is a, c, g, or t
  misc_feature (1760)..(1760): n is a, c, g, or t
  misc_feature (1765)..(1765): n is a, c, g, or t
  misc_feature (1768)..(1768): n is a, c, g, or t
  misc_feature (1771)..(1771): n is a, c, g, or t
  misc_feature (1774)..(1774): n is a, c, g, or t
  misc_feature (1777)..(1778): n is a, c, g, or t
  misc_feature (1785)..(1786): n is a, c, g, or t
  misc_feature (1801)..(1801): n is a, c, g, or t
  misc_feature (1803)..(1804): n is a, c, g, or t
  misc_feature (1808)..(1811): n is a, c, g, or t
  misc_feature (1814)..(1814): n is a, c, g, or t
  misc_feature (1816)..(1816): n is a, c, g, or t
  misc_feature (1818)..(1818): n is a, c, g, or t
  misc_feature (1821)..(1821): n is a, c, g, or t
  misc_feature (1828)..(1828): n is a, c, g, or t
  misc_feature (1830)..(1830): n is a, c, g, or t
  misc_feature (1837)..(1837): n is a, c, g, or t
  misc_feature (1840)..(1840): n is a, c, g, or t
  misc_feature (1843)..(1843): n is a, c, g, or t
  misc_feature (1849)..(1851): n is a, c, g, or t
  misc_feature (1855)..(1855): n is a, c, g, or t
  misc_feature (1858)..(1861): n is a, c, g, or t
  misc_feature (1864)..(1864): n is a, c, g, or t
  misc_feature (1868)..(1869): n is a, c, g, or t
  misc_feature (1872)..(1873): n is a, c, g, or t
  misc_feature (1878)..(1878): n is a, c, g, or t
  misc_feature (1883)..(1883): n is a, c, g, or t
  misc_feature (1885)..(1885): n is a, c, g, or t
  misc_feature (1889)..(1889): n is a, c, g, or t
  misc_feature (1892)..(1892): n is a, c, g, or t
  misc_feature (1901)..(1901): n is a, c, g, or t
  misc_feature (1904)..(1904): n is a, c, g, or t
  misc_feature (1909)..(1909): n is a, c, g, or t
  misc_feature (1916)..(1916): n is a, c, g, or t
  misc_feature (1918)..(1921): n is a, c, g, or t
  misc_feature (1950)..(1950): n is a, c, g, or t
  misc_feature (1952)..(1952): n is a, c, g, or t
  misc_feature (1956)..(1956): n is a, c, g, or t
  misc_feature (1958)..(1958): n is a, c, g, or t
  misc_feature (1963)..(1963): n is a, c, g, or t
  misc_feature (1966)..(1967): n is a, c, g, or t
  misc_feature (1969)..(1969): n is a, c, g, or t
  misc_feature (1974)..(1974): n is a, c, g, or t
  misc_feature (1982)..(1982): n is a, c, g, or t
  misc_feature (1986)..(1989): n is a, c, g, or t
  misc_feature (1991)..(1991): n is a, c, g, or t
  misc_feature (1993)..(1994): n is a, c, g, or t
  misc_feature (1996)..(1997): n is a, c, g, or t
  misc_feature (1999)..(1999): n is a, c, g, or t
  misc_feature (2002)..(2002): n is a, c, g, or t
  misc_feature (2005)..(2005): n is a, c, g, or t
  misc_feature (2007)..(2007): n is a, c, g, or t
  misc_feature (2012)..(2013): n is a, c, g, or t
  misc_feature (2016)..(2016): n is a, c, g, or t
  misc_feature (2018)..(2018): n is a, c, g, or t
  misc_feature (2021)..(2022): n is a, c, g, or t
  misc_feature (2024)..(2024): n is a, c, g, or t
  misc_feature (2026)..(2027): n is a, c, g, or t
  misc_feature (2036)..(2037): n is a, c, g, or t
  misc_feature (2044)..(2044): n is a, c, g, or t
  misc_feature (2049)..(2050): n is a, c, g, or t
  misc_feature (2052)..(2052): n is a, c, g, or t
  misc_feature (2056)..(2057): n is a, c, g, or t
  misc_feature (2061)..(2062): n is a, c, g, or t
  misc_feature (2067)..(2067): n is a, c, g, or t
  misc_feature (2069)..(2069): n is a, c, g, or t
  misc_feature (2071)..(2071): n is a, c, g, or t
  misc_feature (2076)..(2076): n is a, c, g, or t
  misc_feature (2078)..(2079): n is a, c, g, or t
  misc_feature (2081)..(2081): n is a, c, g, or t
  misc_feature (2091)..(2092): n is a, c, g, or t
  misc_feature (2095)..(2095): n is a, c, g, or t
  misc_feature (2097)..(2099): n is a, c, g, or t
  misc_feature (2104)..(2104): n is a, c, g, or t
  misc_feature (2109)..(2110): n is a, c, g, or t
  misc_feature (2121)..(2122): n is a, c, g, or t
annacaaataaaaanangagnaaaanttatatangggggggggnnntggtcntcccccncntnccccccttnngggggnnttcttatttttgggggggnaccantattaaaanttngntcgaacccnacgtcntntcnncgtngttagnacaaggaanacgngnnaatcgtccaacaatgganntcccgncngncagnnanncncgcgcngntcgcagccnnntgtgnncctncgtnccnncagaancacgcacaggcgagcgtgngtnatccatgcttngcnnacaaaagcttctnanannnngtcnncnnngtctngcgtnacccgccangcctnttntnccatagnntcnnannacacncntgnttgnantnncnngaannnnaantnnngacncgganancntngagnatnatnaatncctangnngctngtnannncntnntnngntncanangnagangcnngnccatgttagcanncngnnngnatnnnactcntccnnatcttgntctcnngantngancacnnncccncgnnnnntcnnagcnntnnngnnagtntnacnnngnaaaccnctcnnaagtacgngtgcnatntngntnntcnnncgnanntngcanatcnatagtnncncaccagcntnatnngnngtttacagnctggnanatnctngncactganaccnncanntaatagtnccntcncnngcctntnttgantgtgatngnngcnctnnnannccccttgaaananngttcatncnnannntntacannccncannnatgaanagcncntctaggatctccngnccnctntnctnnntnntntanngantanntnncaataaannngnanaaannncnnncnnnnnnagnntcntntgnnactnatacttnaatncnngnnntncnctnaaatccncnngtcntngnnattanatantaggcantgntttnnttaganncntntgntatcnccatnactcccncnctnctnnatgttnnctanngccanagntnnnnnanannnncataannatncnncttncnaannnatttngtntnagatnncnngcacnaaatnngannnaaagnctatntnangnnngaagnntncattnaannntannnctngcnctntctaacntnanaacccctnncgncatcaanacatnnctacngaaantnacctnnatcccannnctcntntncggnnntctccntncnnnncttnncantanncnnccnnncttnnattnatntancccttangtnntacatnnnntnanctcccntncanntatanattatantctatcctananngtatnacncntctnagtncnttnntcnacnnccntcngncntgnacatnnnngntnnctnctactnaanctcatcacnttnaatgnntctnntactnatanagnnatncttcnntagtngcntacnttagannnaaccaacngctntntnncnnatngnntgtaacatgtacagtaccccctnnccttaannatcggaaccnnnccacatttncnactatnnnntnanngaacaaaannaangnttnnntnnccccatagannnnnagatgnntnatnntngtcngngctacantacgtatnnaancnagcttcatatnctangtatngatngatngataaannnnngtntcactgacntnaantnnnntctnnncnntntttcatncnntttnttcccanaanagtncncnntgacttngnnatntanatatnatnacnatncanntatactnngagggtacagtatantnngtannnnggntntntancacactncntccccanatnganagactnnnctcncannnnatngacnncanntcacntaatntnaganatntctacgttngangtatntgctgantnnnnagatcactatgtagccttctctctgtacnantacncncgctnttnncntactngtgccacnctcnnnncngnngnnanagntanantcacnnacntnacnntngnntactacagnnatacaanctatnngntatnntatnnctaantngnagtcntnntntgacatatanntcncnnnagtcnctatnncatatctatcnnctata

SEQ ID NO: 340 - DNA, 1210 bp, Homo Sapiens
  misc_feature (1)..(1): n is a, c, g, or t
  misc_feature (842)..(842): n is a, c, g, or t
  misc_feature (912)..(912): n is a, c, g, or t
  misc_feature (934)..(934): n is a, c, g, or t
  misc_feature (936)..(936): n is a, c, g, or t
  misc_feature (940)..(940): n is a, c, g, or t
  misc_feature (944)..(944): n is a, c, g, or t
  misc_feature (953)..(953): n is a, c, g, or t
  misc_feature (959)..(959): n is a, c, g, or t
  misc_feature (981)..(981): n is a, c, g, or t
  misc_feature (988)..(988): n is a, c, g, or t
  misc_feature (995)..(995): n is a, c, g, or t
  misc_feature (1028)..(1028): n is a, c, g, or t
  misc_feature (1050)..(1050): n is a, c, g, or t
  misc_feature (1054)..(1054): n is a, c, g, or t
  misc_feature (1059)..(1059): n is a, c, g, or t
  misc_feature (1075)..(1076): n is a, c, g, or t
  misc_feature (1087)..(1088): n is a, c, g, or t
  misc_feature (1098)..(1098): n is a, c, g, or t
  misc_feature (1130)..(1130): n is a, c, g, or t
  misc_feature (1133)..(1133): n is a, c, g, or t
  misc_feature (1137)..(1137): n is a, c, g, or t
  misc_feature (1139)..(1139): n is a, c, g, or t
  misc_feature (1162)..(1162): n is a, c, g, or t
  misc_feature (1166)..(1166): n is a, c, g, or t
  misc_feature (1170)..(1170): n is a, c, g, or t
  misc_feature (1178)..(1178): n is a, c, g, or t
  misc_feature (1185)..(1186): n is a, c, g, or t
  misc_feature (1188)..(1188): n is a, c, g, or t
  misc_feature (1198)..(1198): n is a, c, g, or t
naattagagaaattactatgagaggatcgcatcaccatcaccatcacggatcctatttaggtgacactatagaatcgtcgacccacgcgtccgccgacaaatgcaaatgcgtggacttccagaccctgaagctgcaggagctgcctgatgcagtcccccacggggagatgcccagacacatgcagctctactgcgacaggtacctgtgtgacaaggtcgtccctgggaacagggttaccatcatgggcatctactccatcaagaagtttggcctgactaccagcaggggccgtgacagggtgggcgtgggcatccgaagctcctacatccgtgtcctgggcatccaggtggacacagatggctctggccgcagctttgctggggccgtgagcccccaggaggaggaggagttccgtcgcctggctgccctcccaaatgtctatgaggtcatctccaagagcatcgccccctccatctttgggggcacagacatgaagaaggccattgcctgcctgctctttgggggctcccgaaagaggctccctgatggacttactcgccgaggagacatcaacctgctgatgctaggggaccctgggacagccaagtcccagcttctgaagtttgtggagaagtgttctcccattggggtatacacgtctgggaaaggcagcagcgcagctggactgacagcctcggtgatgagggacccttcgtcccggaatttcatcatggagggcggagccatggtcctggccgatggtggggtcgtctgtattgacgagtttgacaagatgcgagaagatgaccgtgtggcaatccacgaagccatggagcagcanaccatctctatcgccaaggctgggatcaccaccacccctgaactcccgctgctccgtcctggctgctgcnactcagtgttcggccgctggantnaaanaaanggggaaganaacatngacttctgcccccatcttgtcncgcttcnaatgatnttctcgtcaggatgacccaatgagaaaggattnatgctggccaacttgtttcctntgcngggancgcattgaaaaaaacnnggttgggaggnnaattgactgncaaactaaaaatttttgctatgccaagaaatnggncccngntttcaaaagtgaaaaaatgaaancctntttntttggganggggccnnancaaaaaaaangaaccccccccc

SEQ ID NO: 341 - DNA, 1391 bp, Homo Sapiens
  misc_feature (1)..(1): n is a, c, g, or t
  misc_feature (484)..(484): n is a, c, g, or t
  misc_feature (506)..(506): n is a, c, g, or t
  misc_feature (543)..(543): n is a, c, g, or t
  misc_feature (694)..(694): n is a, c, g, or t
  misc_feature (880)..(880): n is a, c, g, or t
  misc_feature (882)..(882): n is a, c, g, or t
  misc_feature (926)..(926): n is a, c, g, or t
  misc_feature (957)..(957): n is a, c, g, or t
  misc_feature (967)..(967): n is a, c, g, or t
  misc_feature (987)..(987): n is a, c, g, or t
  misc_feature (1018)..(1018): n is a, c, g, or t
  misc_feature (1028)..(1028): n is a, c, g, or t
  misc_feature (1051)..(1051): n is a, c, g, or t
  misc_feature (1056)..(1056): n is a, c, g, or t
  misc_feature (1060)..(1060): n is a, c, g, or t
  misc_feature (1075)..(1075): n is a, c, g, or t
  misc_feature (1077)..(1077): n is a, c, g, or t
  misc_feature (1083)..(1083): n is a, c, g, or t
  misc_feature (1088)..(1088): n is a, c, g, or t
  misc_feature (1091)..(1091): n is a, c, g, or t
  misc_feature (1104)..(1105): n is a, c, g, or t
  misc_feature (1109)..(1109): n is a, c, g, or t
  misc_feature (1113)..(1113): n is a, c, g, or t
  misc_feature (1126)..(1127): n is a, c, g, or t
  misc_feature (1129)..(1129): n is a, c, g, or t
  misc_feature (1137)..(1137): n is a, c, g, or t
  misc_feature (1140)..(1140): n is a, c, g, or t
  misc_feature (1144)..(1144): n is a, c, g, or t
  misc_feature (1170)..(1171): n is a, c, g, or t
  misc_feature (1205)..(1205): n is a, c, g, or t
  misc_feature (1210)..(1210): n is a, c, g, or t
  misc_feature (1214)..(1215): n is a, c, g, or t
  misc_feature (1221)..(1224): n is a, c, g, or t
  misc_feature (1232)..(1232): n is a, c, g, or t
  misc_feature (1241)..(1241): n is a, c, g, or t
  misc_feature (1249)..(1249): n is a, c, g, or t
  misc_feature (1255)..(1255): n is a, c, g, or t
  misc_feature (1257)..(1257): n is a, c, g, or t
  misc_feature (1271)..(1271): n is a, c, g, or t
  misc_feature (1281)..(1281): n is a, c, g, or t
  misc_feature (1285)..(1287): n is a, c, g, or t
  misc_feature (1292)..(1294): n is a, c, g, or t
  misc_feature (1303)..(1303): n is a, c, g, or t
  misc_feature (1305)..(1306): n is a, c, g, or t
  misc_feature (1309)..(1309): n is a, c, g, or t
  misc_feature (1313)..(1313): n is a, c, g, or t
  misc_feature (1317)..(1317): n is a, c, g, or t
  misc_feature (1332)..(1332): n is a, c, g, or t
  misc_feature (1335)..(1335): n is a, c, g, or t
  misc_feature (1341)..(1342): n is a, c, g, or t
  misc_feature (1354)..(1354): n is a, c, g, or t
  misc_feature (1358)..(1358): n is a, c, g, or t
  misc_feature (1362)..(1363): n is a, c, g, or t
  misc_feature (1365)..(1365): n is a, c, g, or t
  misc_feature (1367)..(1367): n is a, c, g, or t
  misc_feature (1369)..(1371): n is a, c, g, or t
  misc_feature (1375)..(1377): n is a, c, g, or t
  misc_feature (1380)..(1381): n is a, c, g, or t
  misc_feature (1384)..(1384): n is a, c, g, or t
  misc_feature (1390)..(1390): n is a, c, g, or t
ntaatagagaaattactatgagaggatcgcatcaccatcaccatcacggatcctatttaggtgacactatagaatcgtcgacccacgcgtccgcaggaacccagaatgggggcttcgggacacagccctcctggaggacctgggaaaggccagtggcctgctcctggagaggatgccaacaacaaatgcctgatcttccggaaaaactaagcccctccttcacccccgcacacctgcatccctgccggaggctctgtgaggcacgaaccctgcctccctaggccggaccttgtggacgacagccccacccagtctgtgctctcagccgctggccgaagggcccagcctgctcagaataaagcatgtcctgctgaaaaaaaaaaaaaaaaaaaaaaaaaaagggcggccgctccctatagtgagtcgtattaagcttaattagctgagcttggactcctgttgatagatccagtaatgacctcanaactccatctggatttgttcanaacgctcggttgccgccgggcgttttttattggtganaatccaagctagcttggcgagattttcaggagctaaggaagctaaaatggagaaaaaaatcactggatataccaccgttgatatatcccaatggcatcgtaaagaacattttgaggcatttcagtcagttgctcaatgtacctataaccanaccgttcagctggatattacggcctttttaaagaccgtaaagaaaaataagcacaagttttatccggcctttattcacattcttgcccgcctgatgaatgctcatccggaatttcgtatggcaatgaaagacggtgagctggtgatatgggatagtgttcacccttgttacaccgttttccatgancnaaactgaaacgttttcatcgctctggagtgaataccacgacganttccggcagtttctacacatatattcccaanatgtggcggngttacggtgaaaaacctggncttatttccctaaagggtttattggaaaaanatttttttcntctcacccaatccctggggggantttcnccanttttgatttaaacgngnccaaanggaanaanttttttccccccnntttncccntggggcaaaaatnnancccaaggnaanaagngctaatcccctgggaaattcagttcnnaagccctttggaaggcttccctttcccaaaagtnttaanaatnnaaaatnnnnaaaagggnggggggggnaatttttnaaggantntgggccttaacccnggggaaaacncttnnnttggnnnaaaaaaaantnnccnaaangggnctttttttttttttnggnaacccnnaaaaaaaccccnaaancccnntngnannnaaannnaannccncaaaant

SEQ ID NO: 342 - DNA, 1383 bp, Homo Sapiens
  misc_feature (862)..(862): n is a, c, g, or t
  misc_feature (877)..(877): n is a, c, g, or t
  misc_feature (944)..(944): n is a, c, g, or t
  misc_feature (948)..(948): n is a, c, g, or t
  misc_feature (1007)..(1007): n is a, c, g, or t
  misc_feature (1009)..(1009): n is a, c, g, or t
  misc_feature (1020)..(1020): n is a, c, g, or t
  misc_feature (1028)..(1029): n is a, c, g, or t
  misc_feature (1031)..(1031): n is a, c, g, or t
  misc_feature (1035)..(1035): n is a, c, g, or t
  misc_feature (1038)..(1038): n is a, c, g, or t
  misc_feature (1045)..(1045): n is a, c, g, or t
  misc_feature (1057)..(1057): n is a, c, g, or t
  misc_feature (1061)..(1061): n is a, c, g, or t
  misc_feature (1071)..(1072): n is a, c, g, or t
  misc_feature (1079)..(1079): n is a, c, g, or t
  misc_feature (1100)..(1100): n is a, c, g, or t
  misc_feature (1115)..(1115): n is a, c, g, or t
  misc_feature (1121)..(1122): n is a, c, g, or t
  misc_feature (1127)..(1127): n is a, c, g, or t
  misc_feature (1137)..(1137): n is a, c, g, or t
  misc_feature (1151)..(1152): n is a, c, g, or t
  misc_feature (1155)..(1155): n is a, c, g, or t
  misc_feature (1158)..(1158): n is a, c, g, or t
  misc_feature (1171)..(1172): n is a, c, g, or t
  misc_feature (1187)..(1187): n is a, c, g, or t
  misc_feature (1191)..(1191): n is a, c, g, or t
  misc_feature (1198)..(1198): n is a, c, g, or t
  misc_feature (1200)..(1200): n is a, c, g, or t
  misc_feature (1202)..(1203): n is a, c, g, or t
  misc_feature (1212)..(1212): n is a, c, g, or t
  misc_feature (1233)..(1233): n is a, c, g, or t
  misc_feature (1242)..(1242): n is a, c, g, or t
  misc_feature (1244)..(1244): n is a, c, g, or t
  misc_feature (1246)..(1246): n is a, c, g, or t
  misc_feature (1248)..(1248): n is a, c, g, or t
  misc_feature (1255)..(1255): n is a, c, g, or t
  misc_feature (1257)..(1257): n is a, c, g, or t
  misc_feature (1267)..(1268): n is a, c, g, or t
  misc_feature (1271)..(1271): n is a, c, g, or t
  misc_feature (1275)..(1275): n is a, c, g, or t
  misc_feature (1299)..(1299): n is a, c, g, or t
  misc_feature (1328)..(1328): n is a, c, g, or t
  misc_feature (1335)..(1335): n is a, c, g, or t
  misc_feature (1338)..(1338): n is a, c, g, or t
  misc_feature (1340)..(1340): n is a, c, g, or t
  misc_feature (1351)..(1351): n is a, c, g, or t
  misc_feature (1355)..(1355): n is a, c, g, or t
  misc_feature (1361)..(1362): n is a, c, g, or t
  misc_feature (1381)..(1382): n is a, c, g, or t
atagagaaattactatgagaggatcgcatcaccatcaccatcacggatcctatttaggtgacactatagaatcgtcgacccacgcgtccgaccaagcgctccaggggctttgggtttgtcacatatgccactgtggaggaggtggatgcagctatgaatgcaaggccacacaaggtggatggaagagttgtggaaccaaagagagctgtctccagagaagattctcaaagaccaggtgcccacttaactgtgaaaaagatatttgttggtggcattaaagaagacactgaagaacatcacctaagagattattttgaacagtatggaaaaattgaagtgattgaaatcatgactgaccgaggcagtggcaagaaaaggggctttgcctttgtaacctttgacgaccatgactccgtggataagattgtcattcagaaataccatactgtgaatggccacaactgtgaagttagaaaagccctgtcaaagcaagagatggctagtgcttcatccagccaaagaggtcgaagtggttctggaaactttggtggtggtcgtggaggtggtttcggtgggaatgacaacttcggtcgtggaggaaacttcagtggtcgtggtggctttggtggcagccgtggtggtggtggatatggtggcagtggggatggctataatggatttggtaatgatggtggttatggaggaggcggccctggttactctggaggaagcagaggctatggaagtggtggacagggttatggaaaccagggcagtggctatggcgggagtggcagctatgacagctataacaacggaggcggaggcggctttggcggtggtagtggaagcaattttggangtggtggaagctacnatgattttgggaattacaacaatcagtcttcaaattttggacccatgaagggaggaaatttttggangcanaagctctggcccctatggcggtggaaggccaatactttgcaaacccccaaaaccaaggngnctatggcggtnccgccacnncnatanctntggcatngcaaaaaatttnattnggaaaccaanncttaccnggaaaggaaaaccccaaaaantgccagggaaacctnccggtnncaccnatttttgacnccccccaaccccannggnggncaggccccaaccnnctccaaaaaaaactntttnaaaaaancncnnttggttggnccaaaaaaccccgggaccgtnttttggccnantntnaaacagntnttttttttcnnttntggnaaaggtaaacccttccccaagggntttagggaattttttttttccccccggtntttttcnaantnacccccccccncccnaaaaanncttttttagggcgggaaannc

SEQ ID NO: 343 - DNA, 1383 bp, Homo Sapiens
  misc_feature (543)..(543): n is a, c, g, or t
  misc_feature (659)..(659): n is a, c, g, or t
  misc_feature (665)..(665): n is a, c, g, or t
  misc_feature (687)..(687): n is a, c, g, or t
  misc_feature (710)..(710): n is a, c, g, or t
  misc_feature (719)..(719): n is a, c, g, or t
  misc_feature (726)..(726): n is a, c, g, or t
  misc_feature (738)..(738): n is a, c, g, or t
  misc_feature (749)..(749): n is a, c, g, or t
  misc_feature (768)..(768): n is a, c, g, or t
  misc_feature (791)..(791): n is a, c, g, or t
  misc_feature (799)..(799): n is a, c, g, or t
  misc_feature (808)..(808): n is a, c, g, or t
  misc_feature (817)..(817): n is a, c, g, or t
  misc_feature (819)..(819): n is a, c, g, or t
  misc_feature (836)..(836): n is a, c, g, or t
  misc_feature (841)..(841): n is a, c, g, or t
  misc_feature (858)..(859): n is a, c, g, or t
  misc_feature (872)..(872): n is a, c, g, or t
  misc_feature (878)..(878): n is a, c, g, or t
  misc_feature (905)..(905): n is a, c, g, or t
  misc_feature (921)..(921): n is a, c, g, or t
  misc_feature (926)..(927): n is a, c, g, or t
  misc_feature (932)..(932): n is a, c, g, or t
  misc_feature (939)..(939): n is a, c, g, or t
  misc_feature (946)..(946): n is a, c, g, or t
  misc_feature (949)..(950): n is a, c, g, or t
  misc_feature (958)..(958): n is a, c, g, or t
  misc_feature (966)..(967): n is a, c, g, or t
  misc_feature (970)..(970): n is a, c, g, or t
  misc_feature (976)..(978): n is a, c, g, or t
  misc_feature (992)..(992): n is a, c, g, or t
  misc_feature (994)..(994): n is a, c, g, or t
  misc_feature (997)..(997): n is a, c, g, or t
  misc_feature (1004)..(1006): n is a, c, g, or t
  misc_feature (1013)..(1014): n is a, c, g, or t
  misc_feature (1018)..(1018): n is a, c, g, or t
  misc_feature (1029)..(1029): n is a, c, g, or t
  misc_feature (1034)..(1036): n is a, c, g, or t
  misc_feature (1039)..(1040): n is a, c, g, or t
  misc_feature (1052)..(1052): n is a, c, g, or t
  misc_feature (1054)..(1054): n is a, c, g, or t
  misc_feature (1060)..(1060): n is a, c, g, or t
  misc_feature (1068)..(1068): n is a, c, g, or t
  misc_feature (1073)..(1074): n is a, c, g, or t
  misc_feature (1078)..(1079): n is a, c, g, or t
  misc_feature (1083)..(1083): n is a, c, g, or t
  misc_feature (1085)..(1086): n is a, c, g, or t
  misc_feature (1088)..(1090): n is a, c, g, or t
  misc_feature (1093)..(1093): n is a, c, g, or t
  misc_feature (1095)..(1095): n is a, c, g, or t
  misc_feature (1100)..(1105): n is a, c, g, or t
  misc_feature (1110)..(1111): n is a, c, g, or t
  misc_feature (1119)..(1119): n is a, c, g, or t
  misc_feature (1129)..(1129): n is a, c, g, or t
  misc_feature (1138)..(1138): n is a, c, g, or t
  misc_feature (1140)..(1140): n is a, c, g, or t
  misc_feature (1145)..(1147): n is a, c, g, or t
  misc_feature (1153)..(1153): n is a, c, g, or t
  misc_feature (1169)..(1170): n is a, c, g, or t
  misc_feature (1176)..(1176): n is a, c, g, or t
  misc_feature (1182)..(1182): n is a, c, g, or t
  misc_feature (1186)..(1186): n is a, c, g, or t
  misc_feature (1195)..(1195): n is a, c, g, or t
  misc_feature (1197)..(1197): n is a, c, g, or t
  misc_feature (1201)..(1202): n is a, c, g, or t
  misc_feature (1212)..(1214): n is a, c, g, or t
  misc_feature (1222)..(1222): n is a, c, g, or t
  misc_feature (1224)..(1226): n is a, c, g, or t
  misc_feature (1229)..(1231): n is a, c, g, or t
  misc_feature (1236)..(1236): n is a, c, g, or t
  misc_feature (1240)..(1241): n is a, c, g, or t
  misc_feature (1246)..(1246): n is a, c, g, or t
  misc_feature (1250)..(1251): n is a, c, g, or t
  misc_feature (1258)..(1258): n is a, c, g, or t
  misc_feature (1264)..(1264): n is a, c, g, or t
  misc_feature (1267)..(1268): n is a, c, g, or t
  misc_feature (1271)..(1271): n is a, c, g, or t
  misc_feature (1273)..(1273): n is a, c, g, or t
  misc_feature (1276)..(1277): n is a, c, g, or t
  misc_feature (1280)..(1280): n is a, c, g, or t
  misc_feature (1287)..(1287): n is a, c, g, or t
  misc_feature (1290)..(1291): n is a, c, g, or t
  misc_feature (1299)..(1302): n is a, c, g, or t
  misc_feature (1304)..(1304): n is a, c, g, or t
  misc_feature (1311)..(1311): n is a, c, g, or t
  misc_feature (1315)..(1315): n is a, c, g, or t
  misc_feature (1319)..(1319): n is a, c, g, or t
  misc_feature (1321)..(1321): n is a, c, g, or t
  misc_feature (1338)..(1341): n is a, c, g, or t
  misc_feature (1344)..(1345): n is a, c, g, or t
  misc_feature (1351)..(1351): n is a, c, g, or t
  misc_feature (1355)..(1358): n is a, c, g, or t
  misc_feature (1362)..(1362): n is a, c, g, or t
  misc_feature (1364)..(1364): n is a, c, g, or t
  misc_feature (1368)..(1369): n is a, c, g, or t
  misc_feature (1376)..(1378): n is a, c, g, or t
  misc_feature (1383)..(1383): n is a, c, g, or t
agagaaattaactatgagaggatcgcatcaccatcaccatcacggatcctatttaggtgacactatagaatcgtcgacccacgcgtccgggtcacggcaatcaaccccctgctgtggttcccgaaccccaaggcccgatgggtcccgcgggggtcgcggcgaggccagggcgctttttcggcgtctacctgctctactgcctgaacccccggtaccggggccgcgtctacgtggggttcactgtcaacactgctcgtcgggtccagcagcacaatgggggccgcaaaaaaggcggggcctggcggaccagcgggcgagggccctgggagatggtgctcgtcgtgcacggcttcccgtcctccgtggccgcccttcggtttgagtgggcttggcagcacccgcacgcctcgcgccgcctggcgcacgtggggcctcgcctgcgaggagagacagccttcgctttccacctgcgcgtgctggcgcacatgctgcgcgcaccgccctgggctcgcctcccgctcacgctgcgctgggtgcgcccanacctccgccaggacctctgcctcccgccgccgccgcacgtgcctctggccttcgggcctccaccgccccaggccccggccccaaggcgccgcgcaggtccctttgatgacgcggancctganccagaccagggggatccagggncctgctgctccctgtgcgcccanaccatccangatgaanaggggcccttgngttgcccccancctggctgcctgctaaggncccatgtgatctgcctgaaagangaattttnttcaagaanaaccagganancttctgcccctaaaggnccaangcccttgctgtgaaaanncactgtttttggnaaaacntgatttggttgtgccaaatggacattnaaaaagaaataaaaanactcnnaattnaaaaagncacactngannaaacttgntgaaaacnnatnctcaannnccttaccccctccnanctnctttttnnngcaactnntttngattccacagnttttnnnttnnttaaaaaaaaantntaatcnaaaaaaanaaatnnaatnntaanannannnaantnaaaannnnnnttgtnncccccccnaaaaatttanaaatttaanantaaannnaccctnttaaaaaaaaaaaacnnaaaatntttttntttntaaaaactnanttcnnggtttttttnnnaaaaccanannnttnnnatttntatnnaaaanaaannaaaaaantgaatnccnnaantnccnngtnaaaaaanttnntatatatnnnnantaaaaanttantatntntttataaaaaaaaaatnnnntcnnttctcnaaannnnattnanaaannttttaannnttatn

SEQ ID NO: 344 - DNA, 1261 bp, Homo Sapiens
  misc_feature (85)..(85): n is a, c, g, or t
  misc_feature (90)..(90): n is a, c, g, or t
  misc_feature (93)..(93): n is a, c, g, or t
  misc_feature (101)..(101): n is a, c, g, or t
  misc_feature (105)..(106): n is a, c, g, or t
  misc_feature (115)..(115): n is a, c, g, or t
  misc_feature (138)..(138): n is a, c, g, or t
  misc_feature (149)..(149): n is a, c, g, or t
  misc_feature (153)..(154): n is a, c, g, or t
  misc_feature (157)..(158): n is a, c, g, or t
  misc_feature (160)..(160): n is a, c, g, or t
  misc_feature (170)..(170): n is a, c, g, or t
  misc_feature (189)..(189): n is a, c, g, or t
  misc_feature (194)..(194): n is a, c, g, or t
  misc_feature (217)..(217): n is a, c, g, or t
  misc_feature (220)..(220): n is a, c, g, or t
  misc_feature (236)..(236): n is a, c, g, or t
  misc_feature (242)..(243): n is a, c, g, or t
  misc_feature (248)..(249): n is a, c, g, or t
  misc_feature (264)..(264): n is a, c, g, or t
  misc_feature (278)..(278): n is a, c, g, or t
  misc_feature (282)..(282): n is a, c, g, or t
  misc_feature (285)..(285): n is a, c, g, or t
  misc_feature (291)..(292): n is a, c, g, or t
  misc_feature (294)..(295): n is a, c, g, or t
  misc_feature (302)..(304): n is a, c, g, or t
  misc_feature (310)..(310): n is a, c, g, or t
  misc_feature (337)..(337): n is a, c, g, or t
  misc_feature (345)..(345): n is a, c, g, or t
  misc_feature (347)..(348): n is a, c, g, or t
  misc_feature (351)..(351): n is a, c, g, or t
  misc_feature (353)..(354): n is a, c, g, or t
  misc_feature (357)..(357): n is a, c, g, or t
  misc_feature (360)..(360): n is a, c, g, or t
  misc_feature (362)..(363): n is a, c, g, or t
  misc_feature (372)..(372): n is a, c, g, or t
  misc_feature (380)..(383): n is a, c, g, or t
  misc_feature (390)..(390): n is a, c, g, or t
  misc_feature (392)..(393): n is a, c, g, or t
  misc_feature (401)..(401): n is a, c, g, or t
  misc_feature (405)..(405): n is a, c, g, or t
  misc_feature (408)..(408): n is a, c, g, or t
  misc_feature (410)..(410): n is a, c, g, or t
  misc_feature (415)..(415): n is a, c, g, or t
  misc_feature (418)..(418): n is a, c, g, or t
  misc_feature (421)..(421): n is a, c, g, or t
  misc_feature (423)..(423): n is a, c, g, or t
  misc_feature (429)..(429): n is a, c, g, or t
  misc_feature (433)..(434): n is a, c, g, or t
  misc_feature (436)..(436): n is a, c, g, or t
  misc_feature (438)..(438): n is a, c, g, or t
  misc_feature (443)..(444): n is a, c, g, or t
  misc_feature (447)..(447): n is a, c, g, or t
  misc_feature (451)..(454): n is a, c, g, or t
  misc_feature (459)..(459): n is a, c, g, or t
  misc_feature (470)..(470): n is a, c, g, or t
  misc_feature (481)..(481): n is a, c, g, or t
  misc_feature (485)..(485): n is a, c, g, or t
  misc_feature (491)..(491): n is a, c, g, or t
  misc_feature (496)..(496): n is a, c, g, or t
  misc_feature (533)..(533): n is a, c, g, or t
  misc_feature (556)..(556): n is a, c, g, or t
  misc_feature (564)..(564): n is a, c, g, or t
  misc_feature (567)..(568): n is a, c, g, or t
  misc_feature (570)..(572): n is a, c, g, or t
  misc_feature (574)..(574): n is a, c, g, or t
  misc_feature (586)..(586): n is a, c, g, or t
  misc_feature (589)..(589): n is a, c, g, or t
  misc_feature (594)..(594): n is a, c, g, or t
  misc_feature (597)..(597): n is a, c, g, or t
  misc_feature (603)..(604): n is a, c, g, or t
  misc_feature (609)..(609): n is a, c, g, or t
  misc_feature (613)..(614): n is a, c, g, or t
  misc_feature (618)..(618): n is a, c, g, or t
  misc_feature (621)..(621): n is a, c, g, or t
  misc_feature (630)..(630): n is a, c, g, or t
  misc_feature (632)..(632): n is a, c, g, or t
  misc_feature (645)..(646): n is a, c, g, or t
  misc_feature (649)..(650): n is a, c, g, or t
  misc_feature (671)..(671): n is a, c, g, or t
  misc_feature (697)..(697): n is a, c, g, or t
  misc_feature (703)..(703): n is a, c, g, or t
  misc_feature (705)..(705): n is a, c, g, or t
  misc_feature (709)..(710): n is a, c, g, or t
  misc_feature (739)..(739): n is a, c, g, or t
  misc_feature (742)..(742): n is a, c, g, or t
  misc_feature (751)..(751): n is a, c, g, or t
  misc_feature (760)..(761): n is a, c, g, or t
  misc_feature (764)..(764): n is a, c, g, or t
  misc_feature (766)..(767): n is a, c, g, or t
  misc_feature (770)..(770): n is a, c, g, or t
  misc_feature (776)..(776): n is a, c, g, or t
  misc_feature (804)..(804): n is a, c, g, or t
  misc_feature (814)..(814): n is a, c, g, or t
  misc_feature (823)..(823): n is a, c, g, or t
  misc_feature (827)..(827): n is a, c, g, or t
  misc_feature (843)..(843): n is a, c, g, or t
  misc_feature (858)..(858): n is a, c, g, or t
  misc_feature (860)..(860): n is a, c, g, or t
  misc_feature (862)..(863): n is a, c, g, or t
  misc_feature (873)..(873): n is a, c, g, or t
  misc_feature (886)..(886): n is a, c, g, or t
  misc_feature (890)..(891): n is a, c, g, or t
  misc_feature (894)..(894): n is a, c, g, or t
  misc_feature (898)..(898): n is a, c, g, or t
  misc_feature (926)..(926): n is a, c, g, or t
  misc_feature (937)..(937): n is a, c, g, or t
  misc_feature (942)..(942): n is a, c, g, or t
  misc_feature (954)..(954): n is a, c, g, or t
  misc_feature (964)..(965): n is a, c, g, or t
  misc_feature (971)..(971): n is a, c, g, or t
  misc_feature (1016)..(1016): n is a, c, g, or t
  misc_feature (1024)..(1024): n is a, c, g, or t
  misc_feature (1046)..(1046): n is a, c, g, or t
  misc_feature (1065)..(1065): n is a, c, g, or t
  misc_feature (1067)..(1067): n is a, c, g, or t
  misc_feature (1078)..(1078): n is a, c, g, or t
  misc_feature (1094)..(1094): n is a, c, g, or t
  misc_feature (1097)..(1097): n is a, c, g, or t
  misc_feature (1100)..(1100): n is a, c, g, or t
  misc_feature (1104)..(1104): n is a, c, g, or t
  misc_feature (1107)..(1107): n is a, c, g, or t
  misc_feature (1111)..(1111): n is a, c, g, or t
  misc_feature (1119)..(1119): n is a, c, g, or t
  misc_feature (1124)..(1124): n is a, c, g, or t
  misc_feature (1126)..(1126): n is a, c, g, or t
  misc_feature (1132)..(1132): n is a, c, g, or t
  misc_feature (1139)..(1139): n is a, c, g, or t
  misc_feature (1141)..(1141): n is a, c, g, or t
  misc_feature (1148)..(1148): n is a, c, g, or t
  misc_feature (1156)..(1156): n is a, c, g, or t
  misc_feature (1160)..(1160): n is a, c, g, or t
  misc_feature (1164)..(1165): n is a, c, g, or t
  misc_feature (1167)..(1167): n is a, c, g, or t
  misc_feature (1176)..(1176): n is a, c, g, or t
  misc_feature (1184)..(1185): n is a, c, g, or t
  misc_feature (1192)..(1192): n is a, c, g, or t
  misc_feature (1196)..(1196): n is a, c, g, or t
  misc_feature (1210)..(1210): n is a, c, g, or t
  misc_feature (1217)..(1217): n is a, c, g, or t
  misc_feature (1222)..(1222): n is a, c, g, or t
  misc_feature (1229)..(1229): n is a, c, g, or t
  misc_feature (1245)..(1245): n is a, c, g, or t
  misc_feature (1254)..(1254): n is a, c, g, or t
agagaaattactatgagaggatcgcatcaccatcaccatcacggatcctatttaggtgacactatagaatcgtcgacccacgcgntccgnccncgccgttncggnngatgcacanggacccgatcctgctggacaganacagccatacngttnnganntncagtgcagtncctccttcgtgcctagcancatgncttgtgaattatgtgcatgcacnacntattttatcttgattngctcanngagcnnatacttgaaagctangaaaagaccaaggnccgngcnttgatnntnngcaaccnnnagaacngaaatgctgacacggtcccctcctccnctcagcgncnngcnannganaangnnactgaggantatcattnnnngaagttnannatgatgantagncgncnctganttntgnanagaggnatgnngntntcgcnntcntctnnnnatatncctcccatganaaatggtttcntgcncgttcntgtgnggctcacgcctgattatcccagcactttggagaggtnaatgggggcgcatctgcctgacntgggtagnttnntnnnancctgaccttttngtngaaanccnttctcnngtganattnnatanaangtggcctgncntggtggctgatgnntgnnatcccaccatgctcatgaggngtgaggcagaatgattgcttgaaccntgtggntntcannttgtggtgagctcgagattgcacctttgnacnccttgctgngcaaacgannaangnngtntgtctntagctccccaccagatgaaagataggtnaaattgggtncagatatanattntgctcatttgctggcngactgttccagaaananannctggtaactncttctacattacngtgnnggncttnttcaagcactaaattttataactttttngaaaaaaaatnaatgngtaattttccantttgggggcnnacctcnattccttgtgagcatttttaaatcttgtttgtaaaaaaaattggncttccccntaaaaatttgccccggggccangaaaaaacctgttccgggntntgttaaaaaancctttaaatgggcctngcnttntttntanaggnacaagccnttctncntttcgngggattntntggggtntaaaaatncttnctcnncnaaaaaaaantccaaaannaaatttnaaanttcccgggggtttncgaaatnaaaanaaaactntttgtttttttaaaanacataaacnagttttg

SEQ ID NO: 345 - DNA, 256 bp, Homo Sapiens
  misc_feature (2)..(2): n is a, c, g, or t
  misc_feature (4)..(4): n is a, c, g, or t
tnanaggagaattaactatgagaggatcgcatcaccatcaccatcacggatcctatttaggtgacactatagaatcgtcgacccacgcgtccgcccacgcgtccgcccacgcgtccgggccccgccggccactgcccacccaacagcagccacagccatcacagaagttagggcgcatccgtgaagatgagggggcagtggcgtcatcaacagtcaaggagcctcctgaggctacagccacacctgagccactctc

SEQ ID NO: 346 - DNA, 1187 bp, Homo Sapiens
  misc_feature (15)..(15): n is a, c, g, or t
  misc_feature (511)..(511): n is a, c, g, or t
  misc_feature (532)..(532): n is a, c, g, or t
  misc_feature (902)..(902): n is a, c, g, or t
  misc_feature (927)..(927): n is a, c, g, or t
  misc_feature (929)..(1053): n is a, c, g, or t
  misc_feature (1057)..(1057): n is a, c, g, or t
  misc_feature (1059)..(1059): n is a, c, g, or t
  misc_feature (1067)..(1096): n is a, c, g, or t
  misc_feature (1102)..(1106): n is a, c, g, or t
  misc_feature (1108)..(1117): n is a, c, g, or t
  misc_feature (1119)..(1129): n is a, c, g, or t
  misc_feature (1132)..(1135): n is a, c, g, or t
  misc_feature (1137)..(1146): n is a, c, g, or t
  misc_feature (1149)..(1153): n is a, c, g, or t
  misc_feature (1159)..(1159): n is a, c, g, or t
  misc_feature (1161)..(1165): n is a, c, g, or t
  misc_feature (1169)..(1179): n is a, c, g, or t
  misc_feature (1182)..(1187): n is a, c, g, or t
tagaggaaaattacntatgagaggatcgcatcaccatcaccatcacggatcctatttaggtgacactatagaatcgtcgacccacgcgtccgtccggattggagggagcacagatacaggcaaacatatcaaggagaatgactattatactccaactggggagttccgtgtggaccgtgaaggttctccagtgctgctcaactgcctcatgtacaagatgtgttactatcgctttggacaggtttacacagaagccaagcgtcctccaggctttgaccgtgtccgaaatgctgagattgggaataaagactttgagcttgatgtcctggaggaagcatataccacagaacattggctggtcaggatatacaaggtaaaggacctggataatcgaggcttgtcaaggacataaatgtcacgtccagctctgatatgcttcgcactgagcacatcacatttaggacgttgaagattttttttttttttttttttttaaaatgcagtttgtaanaacaaaactggatggcatcanaattgtctggaagttttgtcttgggcagtatgggctgggccaaatgaaatgatttttataattctaaacaggttaccaaatgaaatgtcatggctttactttggtcaattaaaggggggaatttttttaaaaaatgtgccttatttgttttgacttataactgatttgagggaggcaaaagctatgctaggctgccagaaggacataagcagaccttgtccattctcttagctccctaaattagccaaatagagacttctttctcaaatcaggaaaactatcaaagaccaattcagatcctacatttacagacagttttgtcataaccctttgcattgcagcacctagtacaattccttggaaacagcgnggctcaataaattttattgaatggntnnnnnnnnnnnnnnnnnnnnnnnnnnnnnnnnnnnnnnnnnnnnnnnnnnnnnnnnnnnnnnnnnnnnnnnnnnnnnnnnnnnnnnnnnnnnnnnnnnnnnnnnnnnnnnnnnnnnnnnnnnnnngggngncccccccnnnnnnnnnnnnnnnnnnnnnnnnnnnnnncccccnnnnntnnnnnnnnnncnnnnnnnnnnnttnnnnannnnnnnnnnccnnnnntttttngnnnnncccnnnnnnnnnnnttnnnnnn

SEQ ID NO: 347 - DNA, 1248 bp, Homo Sapiens
  misc_feature (2)..(2): n is a, c, g, or t
  misc_feature (7)..(7): n is a, c, g, or t
  misc_feature (12)..(12): n is a, c, g, or t
  misc_feature (66)..(66): n is a, c, g, or t
  misc_feature (83)..(83): n is a, c, g, or t
  misc_feature (95)..(95): n is a, c, g, or t
  misc_feature (113)..(113): n is a, c, g, or t
  misc_feature (127)..(127): n is a, c, g, or t
  misc_feature (154)..(155): n is a, c, g, or t
  misc_feature (197)..(197): n is a, c, g, or t
  misc_feature (250)..(250): n is a, c, g, or t
  misc_feature (260)..(260): n is a, c, g, or t
  misc_feature (269)..(269): n is a, c, g, or t
  misc_feature (283)..(283): n is a, c, g, or t
  misc_feature (285)..(285): n is a, c, g, or t
  misc_feature (291)..(291): n is a, c, g, or t
  misc_feature (340)..(340): n is a, c, g, or t
  misc_feature (384)..(384): n is a, c, g, or t
  misc_feature (386)..(386): n is a, c, g, or t
  misc_feature (389)..(390): n is a, c, g, or t
  misc_feature (412)..(413): n is a, c, g, or t
  misc_feature (437)..(437): n is a, c, g, or t
  misc_feature (446)..(446): n is a, c, g, or t
  misc_feature (448)..(448): n is a, c, g, or t
  misc_feature (461)..(461): n is a, c, g, or t
  misc_feature (476)..(476): n is a, c, g, or t
  misc_feature (479)..(479): n is a, c, g, or t
  misc_feature (489)..(489): n is a, c, g, or t
  misc_feature (493)..(494): n is a, c, g, or t
  misc_feature (500)..(500): n is a, c, g, or t
  misc_feature (503)..(504): n is a, c, g, or t
  misc_feature (518)..(518): n is a, c, g, or t
  misc_feature (521)..(521): n is a, c, g, or t
  misc_feature (533)..(533): n is a, c, g, or t
  misc_feature (544)..(544): n is a, c, g, or t
  misc_feature (548)..(548): n is a, c, g, or t
  misc_feature (550)..(551): n is a, c, g, or t
  misc_feature (557)..(557): n is a, c, g, or t
  misc_feature (564)..(564): n is a, c, g, or t
  misc_feature (568)..(569): n is a, c, g, or t
  misc_feature (571)..(572): n is a, c, g, or t
  misc_feature (574)..(574): n is a, c, g, or t
  misc_feature (578)..(578): n is a, c, g, or t
  misc_feature (581)..(581): n is a, c, g, or t
  misc_feature (596)..(596): n is a, c, g, or t
  misc_feature (598)..(599): n is a, c, g, or t
  misc_feature (610)..(610): n is a, c, g, or t
  misc_feature (618)..(619): n is a, c, g, or t
  misc_feature (623)..(623): n is a, c, g, or t
  misc_feature (625)..(625): n is a, c, g, or t
  misc_feature (631)..(632): n is a, c, g, or t
  misc_feature (634)..(634): n is a, c, g, or t
  misc_feature (637)..(638): n is a, c, g, or t
  misc_feature (644)..(644): n is a, c, g, or t
  misc_feature (647)..(647): n is a, c, g, or t
  misc_feature (651)..(651): n is a, c, g, or t
  misc_feature (656)..(656): n is a, c, g, or t
  misc_feature (659)..(659): n is a, c, g, or t
  misc_feature (662)..(662): n is a, c, g, or t
  misc_feature (668)..(668): n is a, c, g, or t
  misc_feature (670)..(670): n is a, c, g, or t
  misc_feature (681)..(681): n is a, c, g, or t
  misc_feature (690)..(690): n is a, c, g, or t
  misc_feature (692)..(692): n is a, c, g, or t
  misc_feature (694)..(694): n is a, c, g, or t
  misc_feature (699)..(700): n is a, c, g, or t
  misc_feature (717)..(718): n is a, c, g, or t
  misc_feature (725)..(727): n is a, c, g, or t
  misc_feature (730)..(731): n is a, c, g, or t
  misc_feature (733)..(733): n is a, c, g, or t
  misc_feature (736)..(736): n is a, c, g, or t
  misc_feature (741)..(742): n is a, c, g, or t
  misc_feature (744)..(744): n is a, c, g, or t
  misc_feature (746)..(746): n is a, c, g, or t
  misc_feature (751)..(751): n is a, c, g, or t
  misc_feature (755)..(755): n is a, c, g, or t
  misc_feature (760)..(760): n is a, c, g, or t
  misc_feature (762)..(762): n is a, c, g, or t
  misc_feature (766)..(768): n is a, c, g, or t
  misc_feature (776)..(776): n is a, c, g, or t
  misc_feature (779)..(779): n is a, c, g, or t
  misc_feature (784)..(787): n is a, c, g, or t
  misc_feature (789)..(789): n is a, c, g, or t
  misc_feature (796)..(799): n is a, c, g, or t
  misc_feature (802)..(802): n is a, c, g, or t
  misc_feature (810)..(811): n is a, c, g, or t
  misc_feature (813)..(815): n is a, c, g, or t
  misc_feature (817)..(817): n is a, c, g, or t
  misc_feature (819)..(820): n is a, c, g, or t
  misc_feature (823)..(824): n is a, c, g, or t
  misc_feature (827)..(827): n is a, c, g, or t
  misc_feature (829)..(831): n is a, c, g, or t
  misc_feature (843)..(843): n is a, c, g, or t
  misc_feature (845)..(846): n is a, c, g, or t
  misc_feature (848)..(849): n is a, c, g, or t
  misc_feature (851)..(852): n is a, c, g, or t
  misc_feature (854)..(855): n is a, c, g, or t
  misc_feature (861)..(861): n is a, c, g, or t
  misc_feature (863)..(863): n is a, c, g, or t
  misc_feature (866)..(866): n is a, c, g, or t
  misc_feature (869)..(870): n is a, c, g, or t
  misc_feature (872)..(872): n is a, c, g, or t
  misc_feature (881)..(881): n is a, c, g, or t
  misc_feature (883)..(883): n is a, c, g, or t
  misc_feature (887)..(888): n is a, c, g, or t
  misc_feature (899)..(899): n is a, c, g, or t
  misc_feature (905)..(905): n is a, c, g, or t
  misc_feature (909)..(909): n is a, c, g, or t
  misc_feature (913)..(913): n is a, c, g, or t
  misc_feature (916)..(917): n is a, c, g, or t
  misc_feature (922)..(924): n is a, c, g, or t
  misc_feature (926)..(926): n is a, c, g, or t
  misc_feature (932)..(932): n is a, c, g, or t
  misc_feature (936)..(937): n is a, c, g, or t
  misc_feature (940)..(940): n is a, c, g, or t
  misc_feature (943)..(943): n is a, c, g, or t
  misc_feature (946)..(946): n is a, c, g, or t
  misc_feature (949)..(949): n is a, c, g, or t
  misc_feature (951)..(952): n is a, c, g, or t
  misc_feature (956)..(956): n is a, c, g, or t
  misc_feature (958)..(960): n is a, c, g, or t
  misc_feature (964)..(964): n is a, c, g, or t
  misc_feature (975)..(975): n is a, c, g, or t
  misc_feature (985)..(985): n is a, c, g, or t
  misc_feature (989)..(989): n is a, c, g, or t
  misc_feature (994)..(995): n is a, c, g, or t
  misc_feature (1001)..(1001): n is a, c, g, or t
  misc_feature (1003)..(1005): n is a, c, g, or t
  misc_feature (1012)..(1013): n is a, c, g, or t
  misc_feature (1016)..(1016): n is a, c, g, or t
  misc_feature (1018)..(1018): n is a, c, g, or t
  misc_feature (1021)..(1021): n is a, c, g, or t
  misc_feature (1029)..(1029): n is a, c, g, or t
  misc_feature (1031)..(1032): n is a, c, g, or t
  misc_feature (1037)..(1037): n is a, c, g, or t
  misc_feature (1039)..(1040): n is a, c, g, or t
  misc_feature (1042)..(1042): n is a, c, g, or t
  misc_feature (1044)..(1045): n is a, c, g, or t
  misc_feature (1049)..(1051): n is a, c, g, or t
  misc_feature (1061)..(1062): n is a, c, g, or t
  misc_feature (1066)..(1067): n is a, c, g, or t
  misc_feature (1071)..(1071): n is a, c, g, or t
  misc_feature (1075)..(1075): n is a, c, g, or t
  misc_feature (1077)..(1077): n is a, c, g, or t
  misc_feature (1080)..(1080): n is a, c, g, or t
  misc_feature (1083)..(1083): n is a, c, g, or t
  misc_feature (1087)..(1087): n is a, c, g, or t
  misc_feature (1090)..(1090): n is a, c, g, or t
  misc_feature (1092)..(1093): n is a, c, g, or t
  misc_feature (1099)..(1099): n is a, c, g, or t
  misc_feature (1101)..(1102): n is a, c, g, or t
  misc_feature (1104)..(1104): n is a, c, g, or t
  misc_feature (1109)..(1109): n is a, c, g, or t
  misc_feature (1111)..(1112): n is a, c, g, or t
  misc_feature (1120)..(1122): n is a, c, g, or t
  misc_feature (1124)..(1124): n is a, c, g, or t
  misc_feature (1128)..(1129): n is a, c, g, or t
  misc_feature (1132)..(1132): n is a, c, g, or t
  misc_feature (1138)..(1138): n is a, c, g, or t
  misc_feature (1141)..(1141): n is a, c, g, or t
  misc_feature (1143)..(1143): n is a, c, g, or t
  misc_feature (1145)..(1148): n is a, c, g, or t
  misc_feature (1154)..(1154): n is a, c, g, or t
  misc_feature (1161)..(1162): n is a, c, g, or t
  misc_feature (1165)..(1166): n is a, c, g, or t
  misc_feature (1171)..(1171): n is a, c, g, or t
  misc_feature (1178)..(1179): n is a, c, g, or t
  misc_feature (1182)..(1184): n is a, c, g, or t
  misc_feature (1191)..(1191): n is a, c, g, or t
  misc_feature (1193)..(1194): n is a, c, g, or t
  misc_feature (1200)..(1200): n is a, c, g, or t
  misc_feature (1202)..(1202): n is a, c, g, or t
  misc_feature (1209)..(1209): n is a, c, g, or t
  misc_feature (1212)..(1213): n is a, c, g, or t
  misc_feature (1215)..(1215): n is a, c, g, or t
  misc_feature (1217)..(1217): n is a, c, g, or t
  misc_feature (1224)..(1225): n is a, c, g, or t
  misc_feature (1228)..(1228): n is a, c, g, or t
  misc_feature (1232)..(1234): n is a, c, g, or t
  misc_feature (1237)..(1238): n is a, c, g, or t
gnaaccngcctnctcggggcgcattccagcccttccagcctgcgacctcgcggaaaaaaaaaattncttattttcttgccccntacataccttgnggcgagcaaaaaaattanattttaaccatganggaaatcgtgcacatccaggctggtcnntgtggcagaccagatcggtgccaagttctgggaggtgatcantgatgaaaatggcatcgaccccaccggcacctaccacggggacagcgacctgnagctggaccncatctctgngtactacaatgaancnactggnggcaaatatgttcctcgtgccatcctgttggatctagaacctgggaccntggactctgttcgctcaagtccttttggccaccatctttagacnanacnnctttgtatttggtcagtctggnncaggtaacatctgggccaaaggcnactacacananggcgccaagctgnttgattctgtcctgncangtggtacgcnaatnnaggcanagnncctgtgactgcctncangacttccaaacngaaccactcantggncnngggcanaggctcngganngnncnactntcnttatcagcaagatcngnnaagaatttccnttgaatcnnaatnangcaatnncnttnngtgatngtncccntcacnccnaantgtctnancaccgtgattnggagccctntnantgtcnncccctcttccccccttnnctttggnnnaanncntantgaannanancctanttgnaattnanatannnatgccccnctnatgannnncngcctttnnnncanttttgaanncnnnancnntcnnaancnnnaggtggaatctnanncnncnntnntccttntntcnccnngnattgggtgncntccnncctgccctccntttttncctngtcntannttaannntnaacccncatnnccnttnggnagntnnaaantnnncccnttccccacgtnttcctttttnattnatgcnntggctntnnnccccttnntcntnccngggaaaancnnaacantnntntnnttannnaaattgcctnnatannctcnatcnangcnttncttntcnanngacttntnnanttccntnnctcccctnnntngtgnnaanaccttnccnangnnnncttccntcttggnnttnnatgtncttcacnnagnnnaatgccntnntctttnangtaaagnatnnantntctcctnnctnctgnnnatnncctccgctcc

SEQ ID NO: 348 - DNA, 256 bp, Homo Sapiens
cggcgtccaggagcgcgggagaggccggcccgggcggctcccagggacgcgtggtccgcatgaagggcagaggcgggcgcgggccgcgccgcggtcctgctggcggtggggagaaggccctgaagaggctgaagctagcggtggaggagttcgtgcacgcgacttcggaaggcgaggctcccgggggttgcgaggggcgcggcgccccggtgagctttcgcccgggagggagaacaagccgtaaggaactgaggaa

SEQ ID NO: 349 - DNA, 256 bp, Homo Sapiens
ttccagtgggtcctgagaacggagtagaactttccaaagaggagctgatccgcaggaagcgcgaggagttcattcagaagcatgggaggggtatggagaagtccaacaagtccacgaagtcagatgctccaaaggagaagggcaaaaaagcaccccgggtgtgggaactgggtggctgtgctaacaaagaagtgttggattacagtactcccaccaccaatggaacccctgaggctgccttgtctgaggacatcaa

SEQ ID NO: 350 - DNA, 256 bp, Homo Sapiens
cgggagctaactaccgcgccggggccggggccggggccggggcccgacgtccccgcggggcccgggaccgcgaggaggacggcgggggcctggagcccgcggccgtggcccgcgacctattgaggggcacatctaacatgtcatttgaggagctgttggaattgcagagccaagtggggactaagacgtacaaacaattggtagctggaaatagtcctaagaaacaagcttctagaccacctatccaaaatgcatg

SEQ ID NO: 351 - DNA, 1200 bp, Homo Sapiens
  misc_feature (1)..(1): n is a, c, g, or t
  misc_feature (735)..(737): n is a, c, g, or t
  misc_feature (739)..(790): n is a, c, g, or t
  misc_feature (798)..(798): n is a, c, g, or t
  misc_feature (805)..(805): n is a, c, g, or t
  misc_feature (814)..(814): n is a, c, g, or t
  misc_feature (836)..(836): n is a, c, g, or t
  misc_feature (841)..(841): n is a, c, g, or t
  misc_feature (849)..(849): n is a, c, g, or t
  misc_feature (852)..(852): n is a, c, g, or t
  misc_feature (866)..(866): n is a, c, g, or t
  misc_feature (878)..(878): n is a, c, g, or t
  misc_feature (917)..(917): n is a, c, g, or t
  misc_feature (924)..(924): n is a, c, g, or t
  misc_feature (933)..(933): n is a, c, g, or t
  misc_feature (962)..(962): n is a, c, g, or t
  misc_feature (966)..(966): n is a, c, g, or t
  misc_feature (968)..(968): n is a, c, g, or t
  misc_feature (977)..(978): n is a, c, g, or t
  misc_feature (986)..(986): n is a, c, g, or t
  misc_feature (990)..(990): n is a, c, g, or t
  misc_feature (1015)..(1015): n is a, c, g, or t
  misc_feature (1021)..(1021): n is a, c, g, or t
  misc_feature (1029)..(1029): n is a, c, g, or t
  misc_feature (1036)..(1036): n is a, c, g, or t
  misc_feature (1039)..(1039): n is a, c, g, or t
  misc_feature (1045)..(1045): n is a, c, g, or t
  misc_feature (1048)..(1048): n is a, c, g, or t
  misc_feature (1053)..(1053): n is a, c, g, or t
  misc_feature (1056)..(1057): n is a, c, g, or t
  misc_feature (1063)..(1064): n is a, c, g, or t
  misc_feature (1069)..(1069): n is a, c, g, or t
  misc_feature (1071)..(1071): n is a, c, g, or t
  misc_feature (1075)..(1076): n is a, c, g, or t
  misc_feature (1081)..(1081): n is a, c, g, or t
  misc_feature (1085)..(1085): n is a, c, g, or t
  misc_feature (1091)..(1091): n is a, c, g, or t
  misc_feature (1095)..(1096): n is a, c, g, or t
  misc_feature (1098)..(1098): n is a, c, g, or t
  misc_feature (1103)..(1104): n is a, c, g, or t
  misc_feature (1113)..(1113): n is a, c, g, or t
  misc_feature (1127)..(1127): n is a, c, g, or t
  misc_feature (1133)..(1133): n is a, c, g, or t
  misc_feature (1138)..(1138): n is a, c, g, or t
  misc_feature (1147)..(1147): n is a, c, g, or t
  misc_feature (1163)..(1163): n is a, c, g, or t
  misc_feature (1168)..(1168): n is a, c, g, or t
  misc_feature (1172)..(1172): n is a, c, g, or t
  misc_feature (1183)..(1184): n is a, c, g, or t
naattagagaaattactatgagaggatcgcatcaccatcaccatcacggatcctatttaggtgacactatagaatcgtcgacccacgcgtccgcacagaagaagctgctagaggaaagactaaagcttgtctcagaactgtgggatgctgggatcaaggctgagctgctgtacaagaagaacccaaagctactgaaccagttacagtactgtgaggaggcaggcatcccactggtggctatcatcggcgagcaggaactcaaggatggggtcatcaagctccgttcagtgacgagcagggaagaggtggatgtccgaagagaagaccttgtggaggaaatcaaaaggagaacaggccagcccctctgcatctgctgaactgaacaaactatcagaggaaaggaagtgggactggcactatttgaggttaagacaaactgcatatgtacttcaattgctttgcacttttccgtttcagcggaagacctgaagagtggtcagaacagagcctttgatttttattatggttattttattgattattactggcaaaaacggccaggtacaacacctttttcatacaaggcccaggaggcttagtccagtctgtgctcctgggctacaaggacccagcctgagatggtcccatctgcagggccccgcaccagttggagcagatgcctccccaccaccaattgccaaaggtccaataaaatgcctcaaccacgttaaaaannnannnnnnnnnnnnnnnnnnnnnnnnnnnnnnnnnnnnnnnnnnnnnnnnnnnnaaaagggnggccgcnccctatagngagtcgtattaagcttaattanctgancttggacnccnggttgataaatccngtaatgaccccnaaactccctctggatttgttccaaaaccctcggttgccncccgggngtttttttnttgggggaaaaatccaagcctagcttggncgananttttccggnncctaaggnaacntaaaaatgggaaaaaaaaaatcccngggaantacccccngttgaanttntccccnatnggccnccnnaaaaannttttngngggnntttcngccngttgcnccanngnccctnnacccaaacngttccctggaaatnacgccnttttnaaaacccgnaaaaaaaaaacccaanttttntccnggccttttttnnatttttgccccccgga

SEQ ID NO: 352 - DNA, 1208 bp, Homo Sapiens
  misc_feature (1)..(1): n is a, c, g, or t
  misc_feature (104)..(106): n is a, c, g, or t
  misc_feature (118)..(119): n is a, c, g, or t
  misc_feature (124)..(124): n is a, c, g, or t
  misc_feature (127)..(127): n is a, c, g, or t
  misc_feature (130)..(131): n is a, c, g, or t
  misc_feature (134)..(136): n is a, c, g, or t
  misc_feature (141)..(141): n is a, c, g, or t
  misc_feature (150)..(150): n is a, c, g, or t
  misc_feature (152)..(153): n is a, c, g, or t
  misc_feature (156)..(157): n is a, c, g, or t
  misc_feature (159)..(159): n is a, c, g, or t
  misc_feature (164)..(164): n is a, c, g, or t
  misc_feature (173)..(173): n is a, c, g, or t
  misc_feature (175)..(175): n is a, c, g, or t
  misc_feature (187)..(187): n is a, c, g, or t
  misc_feature (190)..(193): n is a, c, g, or t
  misc_feature (197)..(197): n is a, c, g, or t
  misc_feature (205)..(205): n is a, c, g, or t
  misc_feature (210)..(211): n is a, c, g, or t
  misc_feature (214)..(214): n is a, c, g, or t
  misc_feature (217)..(217): n is a, c, g, or t
  misc_feature (220)..(221): n is a, c, g, or t
  misc_feature (227)..(227): n is a, c, g, or t
  misc_feature (229)..(229): n is a, c, g, or t
  misc_feature (233)..(233): n is a, c, g, or t
  misc_feature (239)..(239): n is a, c, g, or t
  misc_feature (242)..(242): n is a, c, g, or t
  misc_feature (244)..(245): n is a, c, g, or t
  misc_feature (249)..(249): n is a, c, g, or t
  misc_feature (251)..(251): n is a, c, g, or t
  misc_feature (253)..(253): n is a, c, g, or t
  misc_feature (255)..(255): n is a, c, g, or t
  misc_feature (261)..(262): n is a, c, g, or t
  misc_feature (268)..(268): n is a, c, g, or t
  misc_feature (272)..(272): n is a, c, g, or t
  misc_feature (275)..(275): n is a, c, g, or t
  misc_feature (278)..(278): n is a, c, g, or t
  misc_feature (286)..(286): n is a, c, g, or t
  misc_feature (289)..(289): n is a, c, g, or t
  misc_feature (293)..(293): n is a, c, g, or t
  misc_feature (298)..(298): n is a, c, g, or t
  misc_feature (300)..(301): n is a, c, g, or t
  misc_feature (305)..(305): n is a, c, g, or t
  misc_feature (309)..(309): n is a, c, g, or t
  misc_feature (316)..(317): n is a, c, g, or t
  misc_feature (319)..(320): n is a, c, g, or t
  misc_feature (331)..(332): n is a, c, g, or t
  misc_feature (334)..(334): n is a, c, g, or t
  misc_feature (338)..(338): n is a, c, g, or t
  misc_feature (343)..(346): n is a, c, g, or t
  misc_feature (354)..(354): n is a, c, g, or t
  misc_feature (356)..(356): n is a, c, g, or t
  misc_feature (358)..(359): n is a, c, g, or t
  misc_feature (364)..(365): n is a, c, g, or t
  misc_feature (367)..(367): n is a, c, g, or t
  misc_feature (370)..(370): n is a, c, g, or t
  misc_feature (374)..(374): n is a, c, g, or t
  misc_feature (379)..(380): n is a, c, g, or t
  misc_feature (383)..(383): n is a, c, g, or t
  misc_feature (386)..(386): n is a, c, g, or t
  misc_feature (391)..(391): n is a, c, g, or t
  misc_feature (394)..(394): n is a, c, g, or t
  misc_feature (400)..(400): n is a, c, g, or t
  misc_feature (405)..(407): n is a, c, g, or t
  misc_feature (410)..(411): n is a, c, g, or t
  misc_feature (422)..(423): n is a, c, g, or t
  misc_feature (425)..(425): n is a, c, g, or t
  misc_feature (428)..(428): n is a, c, g, or t
  misc_feature (435)..(437): n is a, c, g, or t
  misc_feature (443)..(443): n is a, c, g, or t
  misc_feature (445)..(447): n is a, c, g, or t
  misc_feature (451)..(455): n is a, c, g, or t
  misc_feature (458)..(458): n is a, c, g, or t
  misc_feature (460)..(461): n is a, c, g, or t
  misc_feature (463)..(464): n is a, c, g, or t
  misc_feature (466)..(466): n is a, c, g, or t
  misc_feature (473)..(473): n is a, c, g, or t
  misc_feature (476)..(476): n is a, c, g, or t
  misc_feature (480)..(481): n is a, c, g, or t
  misc_feature (484)..(485): n is a, c, g, or t
  misc_feature (489)..(489): n is a, c, g, or t
  misc_feature (491)..(491): n is a, c, g, or t
  misc_feature (498)..(499): n is a, c, g, or t
  misc_feature (501)..(503): n is a, c, g, or t
  misc_feature (505)..(505): n is a, c, g, or t
  misc_feature (510)..(511): n is a, c, g, or t
  misc_feature (515)..(516): n is a, c, g, or t
  misc_feature (521)..(523): n is a, c, g, or t
  misc_feature (527)..(529): n is a, c, g, or t
  misc_feature (532)..(534): n is a, c, g, or t
  misc_feature (536)..(536): n is a, c, g, or t
  misc_feature (538)..(538): n is a, c, g, or t
  misc_feature (541)..(541): n is a, c, g, or t
  misc_feature (543)..(543): n is a, c, g, or t
  misc_feature (550)..(553): n is a, c, g, or t
  misc_feature (555)..(557): n is a, c, g, or t
  misc_feature (561)..(563): n is a, c, g, or t
  misc_feature (569)..(569): n is a, c, g, or t
  misc_feature (572)..(575): n is a, c, g, or t
  misc_feature (578)..(578): n is a, c, g, or t
  misc_feature (581)..(582): n is a, c, g, or t
  misc_feature (584)..(584): n is a, c, g, or t
  misc_feature (587)..(587): n is a, c, g, or t
  misc_feature (589)..(589): n is a, c, g, or t
  misc_feature (594)..(594): n is a, c, g, or t
  misc_feature (596)..(596): n is a, c, g, or t
  misc_feature (598)..(598): n is a, c, g, or t
  misc_feature (604)..(606): n is a, c, g, or t
  misc_feature (609)..(609): n is a, c, g, or t
  misc_feature (614)..(614): n is a, c, g, or t
  misc_feature (616)..(617): n is a, c, g, or t
  misc_feature (619)..(621): n is a, c, g, or t
  misc_feature (625)..(626): n is a, c, g, or t
  misc_feature (632)..(632): n is a, c, g, or t
  misc_feature (636)..(638): n is a, c, g, or t
  misc_feature (640)..(640): n is a, c, g, or t
  misc_feature (648)..(648): n is a, c, g, or t
  misc_feature (657)..(659): n is a, c, g, or t
  misc_feature (661)..(661): n is a, c, g, or t
  misc_feature (665)..(665): n is a, c, g, or t
  misc_feature (667)..(667): n is a, c, g, or t
  misc_feature (674)..(674): n is a, c, g, or t
  misc_feature (676)..(676): n is a, c, g, or t
  misc_feature (679)..(679): n is a, c, g, or t
  misc_feature (682)..(683): n is a, c, g, or t
  misc_feature (685)..(685): n is a, c, g, or t
  misc_feature (688)..(688): n is a, c, g, or t
  misc_feature (694)..(694): n is a, c, g, or t
  misc_feature (696)..(696): n is a, c, g, or t
  misc_feature (701)..(701): n is a, c, g, or t
  misc_feature (712)..(712): n is a, c, g, or t
  misc_feature (714)..(714): n is a, c, g, or t
  misc_feature (719)..(719): n is a, c, g, or t
  misc_feature (721)..(721): n is a, c, g, or t
  misc_feature (733)..(733): n is a, c, g, or t
  misc_feature (736)..(737): n is a, c, g, or t
  misc_feature (741)..(741): n is a, c, g, or t
  misc_feature (747)..(747): n is a, c, g, or t
  misc_feature (752)..(753): n is a, c, g, or t
  misc_feature (755)..(755): n is a, c, g, or t
  misc_feature (764)..(764): n is a, c, g, or t
  misc_feature (767)..(767): n is a, c, g, or t
  misc_feature (770)..(770): n is a, c, g, or t
  misc_feature (778)..(778): n is a, c, g, or t
  misc_feature (783)..(784): n is a, c, g, or t
  misc_feature (786)..(786): n is a, c, g, or t
  misc_feature (800)..(800): n is a, c, g, or t
  misc_feature (802)..(802): n is a, c, g, or t
  misc_feature (817)..(817): n is a, c, g, or t
  misc_feature (822)..(822): n is a, c, g, or t
  misc_feature (828)..(828): n is a, c, g, or t
  misc_feature (830)..(831): n is a, c, g, or t
  misc_feature (836)..(836): n is a, c, g, or t
  misc_feature (845)..(845): n is a, c, g, or t
  misc_feature (847)..(847): n is a, c, g, or t
  misc_feature (851)..(851): n is a, c, g, or t
  misc_feature (854)..(854): n is a, c, g, or t
  misc_feature (861)..(861): n is a, c, g, or t
  misc_feature (863)..(863): n is a, c, g, or t
  misc_feature (870)..(870): n is a, c, g, or t
  misc_feature (872)..(872): n is a, c, g, or t
  misc_feature (875)..(875): n is a, c, g, or t
  misc_feature (882)..(882): n is a, c, g, or t
  misc_feature (884)..(886): n is a, c, g, or t
  misc_feature (897)..(897): n is a, c, g, or t
  misc_feature (900)..(901): n is a, c, g, or t
  misc_feature (904)..(904): n is a, c, g, or t
  misc_feature (909)..(909): n is a, c, g, or t
  misc_feature (913)..(913): n is a, c, g, or t
  misc_feature (929)..(929): n is a, c, g, or t
  misc_feature (941)..(941): n is a, c, g, or t
  misc_feature (946)..(947): n is a, c, g, or t
  misc_feature (950)..(950): n is a, c, g, or t
  misc_feature (956)..(956): n is a, c, g, or t
  misc_feature (960)..(960): n is a, c, g, or t
  misc_feature (971)..(971): n is a, c, g, or t
  misc_feature (975)..(975): n is a, c, g, or t
  misc_feature (983)..(983): n is a, c, g, or t
  misc_feature (987)..(987): n is a, c, g, or t
  misc_feature (989)..(989): n is a, c, g, or t
  misc_feature (996)..(996): n is a, c, g, or t
  misc_feature (999)..(999): n is a, c, g, or t
  misc_feature (1015)..(1015): n is a, c, g, or t
  misc_feature (1021)..(1021): n is a, c, g, or t
  misc_feature (1024)..(1024): n is a, c, g, or t
  misc_feature (1026)..(1026): n is a, c, g, or t
  misc_feature (1031)..(1031): n is a, c, g, or t
  misc_feature (1033)..(1033): n is a, c, g, or t
  misc_feature (1042)..(1042): n is a, c, g, or t
  misc_feature (1055)..(1055): n is a, c, g, or t
  misc_feature (1090)..(1090): n is a, c, g, or t
  misc_feature (1096)..(1096): n is a, c, g, or t
  misc_feature (1107)..(1107): n is a, c, g, or t
  misc_feature (1109)..(1109): n is a, c, g, or t
  misc_feature (1115)..(1117): n is a, c, g, or t
  misc_feature (1119)..(1119): n is a, c, g, or t
  misc_feature (1123)..(1124): n is a, c, g, or t
  misc_feature (1134)..(1134): n is a, c, g, or t
  misc_feature (1136)..(1136): n is a, c, g, or t
  misc_feature (1141)..(1142): n is a, c, g, or t
  misc_feature (1153)..(1153): n is a, c, g, or t
  misc_feature (1156)..(1157): n is a, c, g, or t
  misc_feature (1160)..(1160): n is a, c, g, or t
  misc_feature (1164)..(1164): n is a, c, g, or t
  misc_feature (1166)..(1168): n is a, c, g, or t
  misc_feature (1178)..(1178): n is a, c, g, or t
  misc_feature (1183)..(1185): n is a, c, g, or t
  misc_feature (1197)..(1197): n is a, c, g, or t
naattagagaaaattactatgaagaggatcgcatcaccatcaccatcacggatcctatttaggtgacactatagaatcgtcgacccacgcgtccgctgacctgnnngctgacatcttnnacaangtnttnnatnnngttcnagaatggcntnngtnncngcatnattgccaanantattgtcaatgntgnnnncatngtggatgntatcnngtntgntanntgttcngnatanggcttnttncnngtcntngncntgaatnntgctgntgantgntcngattatcnatnccantgccnannacantgcnagccaanncnnagggacagccnnanggangggtnnnnggctctgntncnngatcnncnacnagantgacnnccngantgacntcntgaccnacatnnngannaatatcctgannantangctgctnnngctgangnnnctgnnnnngtncnncnngntgcaggnccngttnntgnncccntncctggannannncntggannactnnatgtnnnactnnnggnnncncntcngnatgcacnnnncnnnggannngacctntgnnnnganctnnanggngnagttnangntggacnnngcnctgtncnntnnnctgnncaagangtgnnncntgtcctgngactcggannncntgtncnacatttngntgntcnntnccntgctcntnttctnaaggatcttcnancgacngnaggatagagatnagnncagngataanttccnngntactgacantgntcntgagaccnatctnntngtttacctgaatgntnacatgcatagttacnccacnatttgntnnaccgnttgtttcancnatgnttnacgtcangnctaaggncntgnaagatgntnnntcaagttcaangannctnctganggantcccggatgaacctgnccatgaagcggnccttnntgngaaatngacnggaaatcatcnggantgcttttncccncntattcanccnaaaggcaatctgaagnaattgngancncctgngnatcccctgncgattgccccccncttttcccttttggatggttttggcaggattaacncggaantaaaagtggtncngacccnnncnaaannccaagggttnanccttnnggaaccccatngtnnggnaatntnnnccaatttttnccttnnnaaagggggaaanagggggaaacc

SEQ ID NO: 353 - DNA, 256 bp, Homo Sapiens
acgagactcgtgccaaacttgatgagctttctgctaagcgagagactagtggagaaaaatccagacaattaagagatgctcagcaggatgcaagagataaaatggaggatatcgaacgccaagttagagaattgaaaacaaaaatttcagctatgaaagaagaaaaagaacagcttagtgctgaaagacaagagcagattaagcagaggactaagttggagcttaaagccaaggatttacaagatgaactagcagg

SEQ ID NO: 354 - DNA, 1229 bp, Homo Sapiens
  misc_feature (1)..(1): n is a, c, g, or t
  misc_feature (801)..(801): n is a, c, g, or t
  misc_feature (861)..(861): n is a, c, g, or t
  misc_feature (938)..(939): n is a, c, g, or t
  misc_feature (961)..(961): n is a, c, g, or t
  misc_feature (967)..(967): n is a, c, g, or t
  misc_feature (982)..(983): n is a, c, g, or t
  misc_feature (1000)..(1000): n is a, c, g, or t
  misc_feature (1014)..(1014): n is a, c, g, or t
  misc_feature (1023)..(1023): n is a, c, g, or t
  misc_feature (1025)..(1025): n is a, c, g, or t
  misc_feature (1055)..(1055): n is a, c, g, or t
  misc_feature (1058)..(1059): n is a, c, g, or t
  misc_feature (1065)..(1065): n is a, c, g, or t
  misc_feature (1070)..(1070): n is a, c, g, or t
  misc_feature (1075)..(1075): n is a, c, g, or t
  misc_feature (1077)..(1077): n is a, c, g, or t
  misc_feature (1102)..(1103): n is a, c, g, or t
  misc_feature (1106)..(1106): n is a, c, g, or t
  misc_feature (1114)..(1114): n is a, c, g, or t
  misc_feature (1118)..(1118): n is a, c, g, or t
  misc_feature (1120)..(1120): n is a, c, g, or t
  misc_feature (1130)..(1130): n is a, c, g, or t
  misc_feature (1135)..(1135): n is a, c, g, or t
  misc_feature (1146)..(1146): n is a, c, g, or t
  misc_feature (1151)..(1151): n is a, c, g, or t
  misc_feature (1155)..(1155): n is a, c, g, or t
  misc_feature (1161)..(1161): n is a, c, g, or t
  misc_feature (1164)..(1164): n is a, c, g, or t
  misc_feature (1171)..(1172): n is a, c, g, or t
  misc_feature (1178)..(1179): n is a, c, g, or t
  misc_feature (1185)..(1185): n is a, c, g, or t
  misc_feature (1187)..(1187): n is a, c, g, or t
  misc_feature (1195)..(1195): n is a, c, g, or t
  misc_feature (1201)..(1201): n is a, c, g, or t
  misc_feature (1203)..(1203): n is a, c, g, or t
  misc_feature (1206)..(1206): n is a, c, g, or t
  misc_feature (1223)..(1223): n is a, c, g, or t
  misc_feature (1225)..(1225): n is a, c, g, or t
naattagagaaattactatgagaggatcgcatcaccatcaccatcacggatcctatttaggtgacactatagaatcgtcgacccacgcgtccgcgatccctcaacccctgcactgcgctagtcctaaagaggaaatgtctctacgctgcggggatgcagcccgcaccctggggccccgggtatttgggagatatttttgcagcccagtcagaccgttaagctccttgccagataaaaaaaaggaactcctacagaatggaccagaccttcaagattttgtatctggtgatcttgcagacaggagcacctgggatgaatataaaggaaacctaaaacgccagaaaggagaaaggttaagactacctccatggctaaagacagagattcccatggggaaaaattacaataaactgaaaaatactttgcggaatttaaatctccatacagtatgtgaggaagctcgatgtcccaatattggagagtgttggggaggtggagaatatgccgccacagccacgatcatgttgatgggtgacacatgtacaagaggttgcagattttgttctgttaagactgcaagaaatcctcctccactggatgccagtgagccctacaatactgcaaaggcaattgcagaatggggtctggattatgttgtcctgacatctgtggatcgagatgatatgcctgatgggggagctgaacacattgcaaagaccgtatcatatttaaaggaaaggaatccaaaaatccttgtggagtgtcttactcctgattttcgaggtgatctcaaagcaatanaaaaagttgctctgtcaggattagatgtgtatgcacataatgtagaaacagtcccggaanttacagagtaaggttcgtgatcctcgggccaattttgatcagtccctacgtgtactgaaacatgccaagaaggttcnncctgatgtttttctaaaacatntataangttgggtttaggcgnnaattgatgaaccaggtntttgcaccatgaangcccttcgngnggccaaatgtaaactgcttgactttagganaannttggcncccanaaggngnccccttaagggtgaaaaaaattttnnccngaaaattncaancngggaaaattnggaangatttggattnctttnccgngggggnccnttggggnnttttcnnaaaggngngattttcngaaatntnggntaaaaaaaaaaaaaacncnaatt

SEQ ID NO: 355 - DNA, 1281 bp, Homo Sapiens
  misc_feature (222)..(222): n is a, c, g, or t
  misc_feature (365)..(365): n is a, c, g, or t
  misc_feature (461)..(461): n is a, c, g, or t
  misc_feature (466)..(466): n is a, c, g, or t
  misc_feature (472)..(472): n is a, c, g, or t
  misc_feature (548)..(548): n is a, c, g, or t
  misc_feature (568)..(568): n is a, c, g, or t
  misc_feature (571)..(571): n is a, c, g, or t
  misc_feature (581)..(581): n is a, c, g, or t
  misc_feature (585)..(585): n is a, c, g, or t
  misc_feature (590)..(590): n is a, c, g, or t
  misc_feature (605)..(605): n is a, c, g, or t
  misc_feature (612)..(612): n is a, c, g, or t
  misc_feature (618)..(619): n is a, c, g, or t
  misc_feature (628)..(628): n is a, c, g, or t
  misc_feature (635)..(635): n is a, c, g, or t
  misc_feature (640)..(640): n is a, c, g, or t
  misc_feature (650)..(651): n is a, c, g, or t
  misc_feature (657)..(657): n is a, c, g, or t
  misc_feature (660)..(660): n is a, c, g, or t
  misc_feature (665)..(665): n is a, c, g, or t
  misc_feature (669)..(671): n is a, c, g, or t
  misc_feature (678)..(678): n is a, c, g, or t
  misc_feature (691)..(691): n is a, c, g, or t
  misc_feature (708)..(708): n is a, c, g, or t
  misc_feature (727)..(727): n is a, c, g, or t
  misc_feature (730)..(730): n is a, c, g, or t
  misc_feature (744)..(744): n is a, c, g, or t
  misc_feature (750)..(750): n is a, c, g, or t
  misc_feature (754)..(754): n is a, c, g, or t
  misc_feature (763)..(763): n is a, c, g, or t
  misc_feature (769)..(769): n is a, c, g, or t
  misc_feature (773)..(773): n is a, c, g, or t
  misc_feature (777)..(777): n is a, c, g, or t
  misc_feature (790)..(791): n is a, c, g, or t
  misc_feature (794)..(795): n is a, c, g, or t
  misc_feature (797)..(797): n is a, c, g, or t
  misc_feature (803)..(803): n is a, c, g, or t
  misc_feature (806)..(806): n is a, c, g, or t
  misc_feature (814)..(814): n is a, c, g, or t
  misc_feature (816)..(817): n is a, c, g, or t
  misc_feature (820)..(820): n is a, c, g, or t
  misc_feature (825)..(825): n is a, c, g, or t
  misc_feature (828)..(829): n is a, c, g, or t
  misc_feature (831)..(833): n is a, c, g, or t
  misc_feature (836)..(836): n is a, c, g, or t
  misc_feature (839)..(839): n is a, c, g, or t
  misc_feature (843)..(843): n is a, c, g, or t
  misc_feature (849)..(851): n is a, c, g, or t
  misc_feature (857)..(857): n is a, c, g, or t
  misc_feature (859)..(861): n is a, c, g, or t
  misc_feature (863)..(863): n is a, c, g, or t
  misc_feature (866)..(866): n is a, c, g, or t
  misc_feature (872)..(872): n is a, c, g, or t
  misc_feature (874)..(875): n is a, c, g, or t
  misc_feature (887)..(887): n is a, c, g, or t
  misc_feature (898)..(898): n is a, c, g, or t
  misc_feature (906)..(906): n is a, c, g, or t
  misc_feature (911)..(911): n is a, c, g, or t
  misc_feature (916)..(919): n is a, c, g, or t
  misc_feature (923)..(923): n is a, c, g, or t
  misc_feature (925)..(927): n is a, c, g, or t
  misc_feature (929)..(929): n is a, c, g, or t
  misc_feature (931)..(935): n is a, c, g, or t
  misc_feature (937)..(941): n is a, c, g, or t
  misc_feature (943)..(943): n is a, c, g, or t
  misc_feature (955)..(955): n is a, c, g, or t
  misc_feature (959)..(961): n is a, c, g, or t
  misc_feature (971)..(971): n is a, c, g, or t
  misc_feature (973)..(975): n is a, c, g, or t
  misc_feature (977)..(978): n is a, c, g, or t
  misc_feature (981)..(981): n is a, c, g, or t
  misc_feature (983)..(986): n is a, c, g, or t
  misc_feature (988)..(988): n is a, c, g, or t
  misc_feature (991)..(992): n is a, c, g, or t
  misc_feature (997)..(999): n is a, c, g, or t
  misc_feature (1004)..(1004): n is a, c, g, or t
  misc_feature (1006)..(1006): n is a, c, g, or t
  misc_feature (1012)..(1012): n is a, c, g, or t
  misc_feature (1017)..(1017): n is a, c, g, or t
  misc_feature (1024)..(1024): n is a, c, g, or t
  misc_feature (1033)..(1033): n is a, c, g, or t
  misc_feature (1036)..(1036): n is a, c, g, or t
  misc_feature (1038)..(1038): n is a, c, g, or t
  misc_feature (1041)..(1042): n is a, c, g, or t
  misc_feature (1044)..(1045): n is a, c, g, or t
  misc_feature (1047)..(1047): n is a, c, g, or t
  misc_feature (1051)..(1051): n is a, c, g, or t
  misc_feature (1054)..(1055): n is a, c, g, or t
  misc_feature (1057)..(1062): n is a, c, g, or t
  misc_feature (1066)..(1069): n is a, c, g, or t
  misc_feature (1071)..(1071): n is a, c, g, or t
  misc_feature (1074)..(1074): n is a, c, g, or t
  misc_feature (1080)..(1080): n is a, c, g, or t
  misc_feature (1089)..(1089): n is a, c, g, or t
  misc_feature (1092)..(1092): n is a, c, g, or t
  misc_feature (1097)..(1097): n is a, c, g, or t
  misc_feature (1101)..(1101): n is a, c, g, or t
  misc_feature (1107)..(1107): n is a, c, g, or t
  misc_feature (1109)..(1109): n is a, c, g, or t
  misc_feature (1114)..(1114): n is a, c, g, or t
  misc_feature (1116)..(1116): n is a, c, g, or t
  misc_feature (1124)..(1124): n is a, c, g, or t
  misc_feature (1126)..(1126): n is a, c, g, or t
  misc_feature (1130)..(1132): n is a, c, g, or t
  misc_feature (1134)..(1134): n is a, c, g, or t
  misc_feature (1138)..(1138): n is a, c, g, or t
  misc_feature (1140)..(1140): n is a, c, g, or t
  misc_feature (1142)..(1142): n is a, c, g, or t
  misc_feature (1146)..(1147): n is a, c, g, or t
  misc_feature (1150)..(1150): n is a, c, g, or t
  misc_feature (1152)..(1152): n is a, c, g, or t
  misc_feature (1154)..(1155): n is a, c, g, or t
  misc_feature (1157)..(1157): n is a, c, g, or t
  misc_feature (1160)..(1160): n is a, c, g, or t
  misc_feature (1162)..(1165): n is a, c, g, or t
  misc_feature (1167)..(1167): n is a, c, g, or t
  misc_feature (1169)..(1169): n is a, c, g, or t
  misc_feature (1171)..(1171): n is a, c, g, or t
  misc_feature (1173)..(1173): n is a, c, g, or t
  misc_feature (1177)..(1177): n is a, c, g, or t
  misc_feature (1181)..(1183): n is a, c, g, or t
  misc_feature (1185)..(1186): n is a, c, g, or t
  misc_feature (1188)..(1188): n is a, c, g, or t
  misc_feature (1190)..(1192): n is a, c, g, or t
  misc_feature (1194)..(1195): n is a, c, g, or t
  misc_feature (1199)..(1199): n is a, c, g, or t
  misc_feature (1202)..(1203): n is a, c, g, or t
  misc_feature (1208)..(1208): n is a, c, g, or t
  misc_feature (1210)..(1210): n is a, c, g, or t
  misc_feature (1212)..(1212): n is a, c, g, or t
  misc_feature (1215)..(1216): n is a, c, g, or t
  misc_feature (1218)..(1219): n is a, c, g, or t
  misc_feature (1225)..(1227): n is a, c, g, or t
  misc_feature (1233)..(1233): n is a, c, g, or t
  misc_feature (1235)..(1237): n is a, c, g, or t
  misc_feature (1239)..(1240): n is a, c, g, or t
  misc_feature (1242)..(1242): n is a, c, g, or t
  misc_feature (1244)..(1245): n is a, c, g, or t
  misc_feature (1247)..(1248): n is a, c, g, or t
  misc_feature (1253)..(1253): n is a, c, g, or t
  misc_feature (1259)..(1259): n is a, c, g, or t
  misc_feature (1262)..(1262): n is a, c, g, or t
  misc_feature (1264)..(1264): n is a, c, g, or t
  misc_feature (1266)..(1266): n is a, c, g, or t
  misc_feature (1270)..(1270): n is a, c, g, or t
  misc_feature (1272)..(1273): n is a, c, g, or t
  misc_feature (1275)..(1275): n is a, c, g, or t
  misc_feature (1278)..(1280): n is a, c, g, or t
aatagagaaattactatgagaggatcgcatcaccatcaccatcacggatcctatttaggtgacactatagaatcgtcgacccacgcgtccgggttgagctgctgccgccgccgcctctgtcgtcgtcgcgagtgtggagtcgggactggagctgctgccgcggcgacgccggggatctttgtcgctagctcccggcccttctgccccgccgccttccctcantcagcgttgcccactcctctccggccgggcgcccctgcctccatttctcgctctctgtccaccacacacacggcccccccgatcatggatccgggcagtggcggcggcggcggcggcggcggcggcggcggcgggagcagcancggcagcagcagcagcgactcggcgcctgactgctgggaccaggcggacatggaagcccccgggccgggcccttgcggcggcggcggctccctggnggcgncggccnaggcccagcgggagaacctcagcgcggccttcatccggcaactcaacgtcaacgccaagcccttcgtgcccaacgnccacgccgccgagttcgtgncgnccttcctgcngtgnccggnagcgccgccaccccnagctggnggcacnnccaataacnaacgganccggnatcggcgcgnnaagccntgngacanctgnnnaatcctntcaagaggaatantcattgtgtgaaggttnaaatttcaactgttaaacntgnaacttttcaaaaanctattntaanaaaatgganaaacanaaantgtnttccaaaataatnntgnnanaaaaanaanaaaataantnnaanaaaanaanngnnnggnttntttnaaaaannnaaaggntnnnanaanaaaatncnnataaaattatgnaaaaaaaatanaaaatccnaaaanctaannnnaaantnnnancnnnnngnnnnncntaaaaaaaaaantaannngaaaattaantnnnanntanannnngnaannttaannnattgnanaaaaanaattnatttaantgaaaagtnttnanaannanntnttanaanntnnnnnnaaannnnanaanaaaaanaaaaaattnttnattantttnttttananataantntaaaaaananaaannntntaantntnaatnnaantnanntnttnannnnananantntttnaaannnanntntnnnannaaanttnnaaaanananaannanntttaannnatatanannntnnantnnannaaaanaaaaanaantnanaaanannanttnnna

SEQ ID NO: 356 - DNA, 256 bp, Homo Sapiens
ttattaaagaggagaaattactatgagaggatcgcataccatcaccatcacggatcctatttaggtgacactatagaatcgtcgacccacgcgtccgagaagctgaaggattatttacgaagcaaagagaaacacggcaagaagccagtcaaagagaaccagagtgagggcaagggcagtgacagtgacagtgaaggggataatccggagaaaaagaaactgcaagaacagctgatgggtgccgtcgtgatggaga

SEQ ID NO: 357 - DNA, 256 bp, Homo Sapiens
  misc_feature (2)..(2): n is a, c, g, or t
tnaactatgagaggatcgcatcaccatcaccatcacggatcctatttaggtgacactatagaatcgtcgacccacgcgtccgcccacgcgtccgcccacgcgtccgcccacgcgtccgtccagattaacggtgtagacgtccagaaccgggaagaggcggtggccatcctgagccaggaagagaacaccaacatctccctgctggtggcccgacctgagagtcagctggcgaaaaggtggaaggacagcgaccggg

SEQ ID NO: 358 - DNA, 1325 bp, Homo Sapiens
  misc_feature (950)..(950): n is a, c, g, or t
  misc_feature (953)..(953): n is a, c, g, or t
  misc_feature (977)..(977): n is a, c, g, or t
  misc_feature (995)..(995): n is a, c, g, or t
  misc_feature (1005)..(1005): n is a, c, g, or t
  misc_feature (1016)..(1016): n is a, c, g, or t
  misc_feature (1043)..(1043): n is a, c, g, or t
  misc_feature (1046)..(1046): n is a, c, g, or t
  misc_feature (1049)..(1049): n is a, c, g, or t
  misc_feature (1053)..(1053): n is a, c, g, or t
  misc_feature (1066)..(1066): n is a, c, g, or t
  misc_feature (1073)..(1073): n is a, c, g, or t
  misc_feature (1079)..(1079): n is a, c, g, or t
  misc_feature (1090)..(1090): n is a, c, g, or t
  misc_feature (1105)..(1105): n is a, c, g, or t
  misc_feature (1118)..(1118): n is a, c, g, or t
  misc_feature (1125)..(1125): n is a, c, g, or t
  misc_feature (1144)..(1144): n is a, c, g, or t
  misc_feature (1151)..(1151): n is a, c, g, or t
  misc_feature (1164)..(1164): n is a, c, g, or t
  misc_feature (1167)..(1167): n is a, c, g, or t
  misc_feature (1202)..(1202): n is a, c, g, or t
  misc_feature (1206)..(1206): n is a, c, g, or t
  misc_feature (1212)..(1212): n is a, c, g, or t
  misc_feature (1215)..(1215): n is a, c, g, or t
  misc_feature (1217)..(1217): n is a, c, g, or t
  misc_feature (1219)..(1219): n is a, c, g, or t
  misc_feature (1223)..(1223): n is a, c, g, or t
  misc_feature (1225)..(1225): n is a, c, g, or t
  misc_feature (1234)..(1234): n is a, c, g, or t
  misc_feature (1237)..(1237): n is a, c, g, or t
  misc_feature (1240)..(1240): n is a, c, g, or t
  misc_feature (1242)..(1242): n is a, c, g, or t
  misc_feature (1245)..(1246): n is a, c, g, or t
  misc_feature (1261)..(1261): n is a, c, g, or t
  misc_feature (1273)..(1273): n is a, c, g, or t
  misc_feature (1276)..(1278): n is a, c, g, or t
  misc_feature (1282)..(1282): n is a, c, g, or t
  misc_feature (1285)..(1285): n is a, c, g, or t
  misc_feature (1290)..(1290): n is a, c, g, or t
  misc_feature (1299)..(1300): n is a, c, g, or t
  misc_feature (1305)..(1306): n is a, c, g, or t
  misc_feature (1308)..(1308): n is a, c, g, or t
  misc_feature (1312)..(1312): n is a, c, g, or t
  misc_feature (1318)..(1318): n is a, c, g, or t
  misc_feature (1320)..(1320): n is a, c, g, or t
  misc_feature (1325)..(1325): n is a, c, g, or t
atagagaaattactatgagaggatcgcatcaccatcaccatcacggatcctatttaggtgacactatagaatcgtcgacccacgcgtccgcggacgcgtgggcggcgggagctcggcggagggcgggccaggtgactggtccgggccatgccgaggaagaagccattcagcgtgaagcagaagaagaagcagttgcaggacaaacgggagcggaagagagggcttcaagatgggctgcgctccagttccaacagccgcagcgggagccgggagcggcgagaggaacagaccgacacctcggacggggagtctgtgacccatcatatccgcaggcttaaccagcagccttctcaggggctgggtccacgaggctacgacccaaatcgataccgactgcattttgagagagacagcagggaggaggtagagaggagaaagagagcagcccgggagcaagttctacagccggtcagtgctgagttgttggagctggacatccgggaggtgtatcagcctggctcagttctggactttcctcgacgtcctccttggagctatgagatgtccaaggagcaactaatgagccaagaggaacggagcttccaagactatcttgggaagattcatggggcttactcctctgagaaactcagctactttgagcacaatctggagacatggaggcagctgtggcgggtgttagagatgtctgacatcgtcctgcttatcactgatatccgacatccagttgtgaatttcccgccagcactttatgagtatgtgactggagaacttggactggccctggtgctggttttgaacaaggtggatctggccccgccagctcttgtggttgcctggaagcattatttccatcaacactatccccagctccacgtcgtccttttcacctcttttcctcgggacccccgcaccccacaggaccctantantgtcttgaaaaaaaatccgaagcnggggaaaagatggactcnggccctgggnccaaaacattnctgaaacctgtgaaccctcctgtgggnaantgnattnaacacctggcggnaaaaatnctcggnattggctgggncccctggggtatggntttgggaaaaaanaaaaaanatgcccccatctggggacnccaatgntcccatggaccantgncccccaaacctaaaggggggggaccccccggtggnttcnatgggnaancncnttantnggttggggnaanttngnttnnaaccggccaccaaanttaaaatttttnccnnngggnggngcccnccctttccnnttttnngngggntggggnanccccn

SEQ ID NO: 359 - DNA, 1339 bp, Homo Sapiens
  misc_feature (845)..(845): n is a, c, g, or t
  misc_feature (868)..(868): n is a, c, g, or t
  misc_feature (932)..(932): n is a, c, g, or t
  misc_feature (982)..(982): n is a, c, g, or t
  misc_feature (991)..(991): n is a, c, g, or t
  misc_feature (1003)..(1003): n is a, c, g, or t
  misc_feature (1009)..(1009): n is a, c, g, or t
  misc_feature (1017)..(1017): n is a, c, g, or t
  misc_feature (1019)..(1019): n is a, c, g, or t
  misc_feature (1026)..(1026): n is a, c, g, or t
  misc_feature (1032)..(1032): n is a, c, g, or t
  misc_feature (1034)..(1034): n is a, c, g, or t
  misc_feature (1052)..(1052): n is a, c, g, or t
  misc_feature (1089)..(1089): n is a, c, g, or t
  misc_feature (1098)..(1098): n is a, c, g, or t
  misc_feature (1100)..(1100): n is a, c, g, or t
  misc_feature (1102)..(1102): n is a, c, g, or t
  misc_feature (1107)..(1107): n is a, c, g, or t
  misc_feature (1119)..(1119): n is a, c, g, or t
  misc_feature (1122)..(1122): n is a, c, g, or t
  misc_feature (1124)..(1125): n is a, c, g, or t
  misc_feature (1130)..(1130): n is a, c, g, or t
  misc_feature (1142)..(1142): n is a, c, g, or t
  misc_feature (1161)..(1161): n is a, c, g, or t
  misc_feature (1168)..(1169): n is a, c, g, or t
  misc_feature (1193)..(1193): n is a, c, g, or t
  misc_feature (1201)..(1201): n is a, c, g, or t
  misc_feature (1203)..(1203): n is a, c, g, or t
  misc_feature (1212)..(1212): n is a, c, g, or t
  misc_feature (1220)..(1220): n is a, c, g, or t
  misc_feature (1223)..(1223): n is a, c, g, or t
  misc_feature (1226)..(1226): n is a, c, g, or t
  misc_feature (1243)..(1243): n is a, c, g, or t
  misc_feature (1250)..(1251): n is a, c, g, or t
  misc_feature (1256)..(1258): n is a, c, g, or t
  misc_feature (1261)..(1261): n is a, c, g, or t
  misc_feature (1274)..(1274): n is a, c, g, or t
  misc_feature (1276)..(1276): n is a, c, g, or t
  misc_feature (1284)..(1286): n is a, c, g, or t
  misc_feature (1295)..(1296): n is a, c, g, or t
  misc_feature (1303)..(1304): n is a, c, g, or t
  misc_feature (1306)..(1306): n is a, c, g, or t
  misc_feature (1312)..(1312): n is a, c, g, or t
  misc_feature (1315)..(1315): n is a, c, g, or t
  misc_feature (1338)..(1339): n is a, c, g, or t
tagagaaattactatgagaggatcgcatcaccatcaccatcacggatcctatttaggtgacactatagaatcgtcgacccacgcgtccgggaacgggtttggcgtgtgggacgcagctgcctctgtactggggagtcacggagtggccgggctccagggacatggcggcggcctctgcggtgtcggtgctgctggtggcggcggagaggaaccggtggcatcgtctcccgagcctgctcctgccgccgaggacatgggtgtggaggcaaagaaccatgaagtacacaacagccacaggaagaaacattaccaaggtcctcattgcaaacagaggagaaattgcctgcagggtgatgcgcacagccaaaaaactgggtgtacagactgtggcggtttatagtgaggctgacagaaattccatgcatgtagatatggcagatgaagcatattccatcggccccgctccctcccagcagagctacctatctatggagaaaatcattcaagtggccaagacctctgctgcacaggctatccatccaggatgcggttttctttcagaaaacatggaatttgctgaactttgtaagcaagaaggaattatttttataggccctcctccatctgcaattagagacatgggtataaagagcacatccaaatccataatggctgctgctggagtacctgttgtggagggttatcatggtgaggaccaatcagaccagtgcctgaaggaacacgccaggagaattggctatcctgtcatgattaaagccgtccggggtggaggaggaaaaggaatgaggattgttagatcagaacaagaatttcagaacagttanagtcagcacggagagaagctaanaagtctttcaatgatgatgctatgctgatcgagaagtttgtaaacacaccgaggcatgtaaaantccagggtgtttggtgatcaccatggcaatgctgtgtacttgtttgaaanaaactgtantgtgcaaaagcnacatcnaaaaatcntngaggagnccccancncctggtattaatctgaantaaaaaaaactggaaaaactgcatcaaactgctaaanctgtaattntntngaacngggactgggganttntnnggacncaaacatatttntgtttttggaaaaaaaaanggtgcannggaaatctgtttttgaaaatcccngaacttcntntgggagggnccttaaanttnccngaaaaaattttttcccnaaaaaanntcccnnnccncctccccccaaantnggaaaatnnnaatttttcnnggggggnntntgcccnttncccaaacccccccaaaagggggnn

SEQ ID NO: 360 - DNA, 1200 bp, Homo Sapiens
  misc_feature (6)..(6): n is a, c, g, or t
  misc_feature (10)..(10): n is a, c, g, or t
  misc_feature (14)..(15): n is a, c, g, or t
  misc_feature (19)..(20): n is a, c, g, or t
  misc_feature (25)..(25): n is a, c, g, or t
  misc_feature (27)..(27): n is a, c, g, or t
  misc_feature (32)..(32): n is a, c, g, or t
  misc_feature (40)..(41): n is a, c, g, or t
  misc_feature (49)..(49): n is a, c, g, or t
  misc_feature (61)..(61): n is a, c, g, or t
  misc_feature (69)..(69): n is a, c, g, or t
  misc_feature (83)..(83): n is a, c, g, or t
  misc_feature (90)..(92): n is a, c, g, or t
  misc_feature (95)..(95): n is a, c, g, or t
  misc_feature (97)..(99): n is a, c, g, or t
  misc_feature (101)..(101): n is a, c, g, or t
  misc_feature (113)..(113): n is a, c, g, or t
  misc_feature (131)..(131): n is a, c, g, or t
  misc_feature (138)..(139): n is a, c, g, or t
  misc_feature (185)..(185): n is a, c, g, or t
  misc_feature (195)..(195): n is a, c, g, or t
  misc_feature (202)..(202): n is a, c, g, or t
  misc_feature (207)..(207): n is a, c, g, or t
  misc_feature (247)..(247): n is a, c, g, or t
  misc_feature (252)..(252): n is a, c, g, or t
  misc_feature (262)..(262): n is a, c, g, or t
  misc_feature (268)..(268): n is a, c, g, or t
  misc_feature (282)..(282): n is a, c, g, or t
  misc_feature (288)..(288): n is a, c, g, or t
  misc_feature (309)..(310): n is a, c, g, or t
  misc_feature (313)..(313): n is a, c, g, or t
  misc_feature (319)..(319): n is a, c, g, or t
  misc_feature (321)..(321): n is a, c, g, or t
  misc_feature (342)..(342): n is a, c, g, or t
  misc_feature (347)..(347): n is a, c, g, or t
  misc_feature (365)..(365): n is a, c, g, or t
  misc_feature (368)..(368): n is a, c, g, or t
  misc_feature (375)..(375): n is a, c, g, or t
  misc_feature (386)..(386): n is a, c, g, or t
  misc_feature (397)..(397): n is a, c, g, or t
  misc_feature (415)..(415): n is a, c, g, or t
  misc_feature (430)..(430): n is a, c, g, or t
  misc_feature (448)..(448): n is a, c, g, or t
  misc_feature (451)..(452): n is a, c, g, or t
  misc_feature (463)..(463): n is a, c, g, or t
  misc_feature (469)..(469): n is a, c, g, or t
  misc_feature (479)..(480): n is a, c, g, or t
  misc_feature (484)..(485): n is a, c, g, or t
  misc_feature (492)..(492): n is a, c, g, or t
  misc_feature (494)..(494): n is a, c, g, or t
  misc_feature (500)..(500): n is a, c, g, or t
  misc_feature (509)..(509): n is a, c, g, or t
  misc_feature (516)..(516): n is a, c, g, or t
  misc_feature (522)..(522): n is a, c, g, or t
  misc_feature (529)..(529): n is a, c, g, or t
  misc_feature (534)..(535): n is a, c, g, or t
  misc_feature (546)..(546): n is a, c, g, or t
  misc_feature (562)..(562): n is a, c, g, or t
  misc_feature (566)..(566): n is a, c, g, or t
  misc_feature (568)..(569): n is a, c, g, or t
  misc_feature (575)..(575): n is a, c, g, or t
  misc_feature (581)..(581): n is a, c, g, or t
  misc_feature (589)..(589): n is a, c, g, or t
  misc_feature (593)..(593): n is a, c, g, or t
  misc_feature (600)..(600): n is a, c, g, or t
  misc_feature (602)..(602): n is a, c, g, or t
  misc_feature (606)..(606): n is a, c, g, or t
  misc_feature (609)..(609): n is a, c, g, or t
  misc_feature (614)..(614): n is a, c, g, or t
  misc_feature (620)..(620): n is a, c, g, or t
  misc_feature (628)..(628): n is a, c, g, or t
  misc_feature (636)..(636): n is a, c, g, or t
  misc_feature (639)..(639): n is a, c, g, or t
  misc_feature (651)..(651): n is a, c, g, or t
  misc_feature (660)..(660): n is a, c, g, or t
  misc_feature (669)..(669): n is a, c, g, or t
  misc_feature (671)..(671): n is a, c, g, or t
  misc_feature (678)..(679): n is a, c, g, or t
  misc_feature (685)..(686): n is a, c, g, or t
  misc_feature (689)..(690): n is a, c, g, or t
  misc_feature (702)..(702): n is a, c, g, or t
  misc_feature (704)..(705): n is a, c, g, or t
  misc_feature (709)..(710): n is a, c, g, or t
  misc_feature (714)..(715): n is a, c, g, or t
  misc_feature (717)..(718): n is a, c, g, or t
  misc_feature (727)..(728): n is a, c, g, or t
  misc_feature (730)..(730): n is a, c, g, or t
  misc_feature (732)..(734): n is a, c, g, or t
  misc_feature (736)..(737): n is a, c, g, or t
  misc_feature (741)..(742): n is a, c, g, or t
  misc_feature (753)..(753): n is a, c, g, or t
  misc_feature (757)..(760): n is a, c, g, or t
  misc_feature (762)..(762): n is a, c, g, or t
  misc_feature (764)..(764): n is a, c, g, or t
  misc_feature (774)..(774): n is a, c, g, or t
  misc_feature (776)..(776): n is a, c, g, or t
  misc_feature (778)..(778): n is a, c, g, or t
  misc_feature (782)..(782): n is a, c, g, or t
  misc_feature (785)..(785): n is a, c, g, or t
  misc_feature (790)..(791): n is a, c, g, or t
  misc_feature (793)..(793): n is a, c, g, or t
  misc_feature (795)..(795): n is a, c, g, or t
  misc_feature (798)..(799): n is a, c, g, or t
  misc_feature (801)..(802): n is a, c, g, or t
  misc_feature (805)..(805): n is a, c, g, or t
  misc_feature (808)..(810): n is a, c, g, or t
  misc_feature (812)..(812): n is a, c, g, or t
  misc_feature (816)..(816): n is a, c, g, or t
  misc_feature (828)..(828): n is a, c, g, or t
  misc_feature (831)..(831): n is a, c, g, or t
  misc_feature (834)..(834): n is a, c, g, or t
  misc_feature (841)..(842): n is a, c, g, or t
  misc_feature (848)..(848): n is a, c, g, or t
  misc_feature (851)..(851): n is a, c, g, or t
  misc_feature (856)..(857): n is a, c, g, or t
  misc_feature (859)..(863): n is a, c, g, or t
  misc_feature (865)..(867): n is a, c, g, or t
  misc_feature (869)..(869): n is a, c, g, or t
  misc_feature (871)..(873): n is a, c, g, or t
  misc_feature (875)..(877): n is a, c, g, or t
  misc_feature (883)..(883): n is a, c, g, or t
  misc_feature (887)..(887): n is a, c, g, or t
  misc_feature (889)..(889): n is a, c, g, or t
  misc_feature (893)..(894): n is a, c, g, or t
  misc_feature (915)..(916): n is a, c, g, or t
  misc_feature (922)..(922): n is a, c, g, or t
  misc_feature (927)..(927): n is a, c, g, or t
  misc_feature (930)..(930): n is a, c, g, or t
  misc_feature (936)..(936): n is a, c, g, or t
  misc_feature (938)..(939): n is a, c, g, or t
  misc_feature (944)..(945): n is a, c, g, or t
  misc_feature (947)..(948): n is a, c, g, or t
  misc_feature (952)..(952): n is a, c, g, or t
  misc_feature (956)..(956): n is a, c, g, or t
  misc_feature (959)..(959): n is a, c, g, or t
  misc_feature (961)..(961): n is a, c, g, or t
  misc_feature (963)..(963): n is a, c, g, or t
  misc_feature (969)..(969): n is a, c, g, or t
  misc_feature (973)..(974): n is a, c, g, or t
  misc_feature (983)..(983): n is a, c, g, or t
  misc_feature (988)..(988): n is a, c, g, or t
  misc_feature (990)..(990): n is a, c, g, or t
  misc_feature (992)..(994): n is a, c, g, or t
  misc_feature (996)..(996): n is a, c, g, or t
  misc_feature (998)..(998): n is a, c, g, or t
  misc_feature (1000)..(1000): n is a, c, g, or t
  misc_feature (1002)..(1003): n is a, c, g, or t
  misc_feature (1007)..(1007): n is a, c, g, or t
  misc_feature (1011)..(1014): n is a, c, g, or t
  misc_feature (1017)..(1017): n is a, c, g, or t
  misc_feature (1019)..(1019): n is a, c, g, or t
  misc_feature (1022)..(1023): n is a, c, g, or t
  misc_feature (1037)..(1037): n is a, c, g, or t
  misc_feature (1039)..(1040): n is a, c, g, or t
  misc_feature (1046)..(1046): n is a, c, g, or t
  misc_feature (1050)..(1050): n is a, c, g, or t
  misc_feature (1053)..(1053): n is a, c, g, or t
  misc_feature (1055)..(1056): n is a, c, g, or t
  misc_feature (1059)..(1062): n is a, c, g, or t
  misc_feature (1067)..(1069): n is a, c, g, or t
  misc_feature (1074)..(1074): n is a, c, g, or t
  misc_feature (1078)..(1078): n is a, c, g, or t
  misc_feature (1088)..(1088): n is a, c, g, or t
  misc_feature (1106)..(1106): n is a, c, g, or t
  misc_feature (1109)..(1109): n is a, c, g, or t
  misc_feature (1114)..(1118): n is a, c, g, or t
  misc_feature (1120)..(1120): n is a, c, g, or t
  misc_feature (1122)..(1122): n is a, c, g, or t
  misc_feature (1128)..(1128): n is a, c, g, or t
  misc_feature (1136)..(1136): n is a, c, g, or t
  misc_feature (1141)..(1141): n is a, c, g, or t
  misc_feature (1147)..(1147): n is a, c, g, or t
  misc_feature (1149)..(1149): n is a, c, g, or t
  misc_feature (1151)..(1152): n is a, c, g, or t
  misc_feature (1154)..(1154): n is a, c, g, or t
  misc_feature (1166)..(1166): n is a, c, g, or t
  misc_feature (1169)..(1169): n is a, c, g, or t
  misc_feature (1171)..(1171): n is a, c, g, or t
  misc_feature (1173)..(1174): n is a, c, g, or t
  misc_feature (1176)..(1176): n is a, c, g, or t
  misc_feature (1185)..(1186): n is a, c, g, or t
  misc_feature (1188)..(1190): n is a, c, g, or t
  misc_feature (1193)..(1194): n is a, c, g, or t
  misc_feature (1196)..(1197): n is a, c, g, or t
  misc_feature (1199)..(1199): n is a, c, g, or t
aaaaanatanaagnnaaanntattntngtggngggggtcnncatctccntccaccatgtcnggtatatntattttatggaggncactatnnnaancnnncncacccccgacgntccgatggcgttgaatgncttcacnngaaagttctccgcgtcccagcacatgggttccctcggcttcctgcntcggaagcgnatcagcnggcancgtgggaaggtgaagagcttccctaaggatgacccatccnagccngtccacctcncagccntcctgggatacatngctggnatgactcacatcgtgcggganntcnacaggncnggatccaaggtgaacaagaangaggnggcggatgctgtgaccantgnacagacnccacccatggnggttgtgggcnttgtgggctacgaggaancccctcaaggcctcnggaccttcaagactgtcnttnntgatcacatcngtgatnaatgcaaganncgtnnctataananttggcntatatctangaataangccttnaccaagnactgnnagaaatggcangatgaggatggccaanaagnannttgganaagganttcatcancatnaagaaanantgcnaantcatncgtgtnattggtcnaaactcanacncgcgcctgcttnctctgcganaaaataacngnccacttnnatgcannatnncaatgtgaacgnannttcnntatnncnncaataagcnngnannnanncccnncatattcgctngatnnnncnanggttcccccntncntccnaangtttnngnantcnnannaanatnnntnttangtcattcctggnctnctnataaagnnccatangcncacanntnnnnngnnnancnnntnnnttttgnttantncccnnaaaaaattgtactcctacaannaactcnacaanagnttcttntnntaaannanntttntttngananantttgcnattnncaattcctntcatncnannnanancntnntctntttnnnnacncnctnngttaaaaaattctngnnaacccntctncananncannnntattnnnacaanaatntaatcttaantcttttttccttcaaggnctntcctnnnnntntnggaagntgtcaaanttacnaaatanancnnantcctttctactnttnananntnacacctaanncnnnacnnannana

SEQ ID NO: 361 - DNA, 1175 bp, Homo Sapiens
  misc_feature (969)..(969): n is a, c, g, or t
  misc_feature (1006)..(1006): n is a, c, g, or t
  misc_feature (1014)..(1014): n is a, c, g, or t
  misc_feature (1016)..(1016): n is a, c, g, or t
  misc_feature (1025)..(1025): n is a, c, g, or t
  misc_feature (1038)..(1038): n is a, c, g, or t
  misc_feature (1055)..(1055): n is a, c, g, or t
  misc_feature (1062)..(1064): n is a, c, g, or t
  misc_feature (1075)..(1076): n is a, c, g, or t
  misc_feature (1078)..(1078): n is a, c, g, or t
  misc_feature (1081)..(1081): n is a, c, g, or t
  misc_feature (1096)..(1096): n is a, c, g, or t
  misc_feature (1100)..(1100): n is a, c, g, or t
  misc_feature (1103)..(1103): n is a, c, g, or t
  misc_feature (1107)..(1107): n is a, c, g, or t
  misc_feature (1109)..(1110): n is a, c, g, or t
  misc_feature (1115)..(1115): n is a, c, g, or t
  misc_feature (1129)..(1129): n is a, c, g, or t
  misc_feature (1131)..(1131): n is a, c, g, or t
  misc_feature (1133)..(1133): n is a, c, g, or t
  misc_feature (1139)..(1139): n is a, c, g, or t
  misc_feature (1146)..(1146): n is a, c, g, or t
  misc_feature (1153)..(1153): n is a, c, g, or t
  misc_feature (1163)..(1164): n is a, c, g, or t
tagagaaaattactatgaagaggatcgcatcaccatcaccatcacggatcctatttaggtgacactatagaatcgtcgacccacgcgtccgagcccaagcctctggaagagccaaaacacgagaccaaaaagctgaagaatctttcagagtacgctcagacactacagctgggttggaatgggcttctggtgttgaaaaacagctgcttccccacgtctatgcatatcctagagggggaccagggggtgatcagcagtctcctcaaagaccacacttctgggagcaagctgacccagctgaagatcgcccagcgccttcgactggaccagcccaagcttgacgaggtcacacgacgcatcaagcaggggagccccaacggctatgcggtcctcttagccacccaggcaacccccagtgggcttggcactgaggggatgcccacagtagagcccggtctgcagaggcggcttctcaggaacctggtctcctacttgaaacagaagcaggccgcaggggtgatcagcttgccagtgggggggtccaagggcagagacggcacaggcatgctctacgccttcccaccctgcgacttttcccagcagtacctccagtcagcactaaggacattgggcaagctagaagaagaacacatggtgatagtcatcgtcagagacactgcctagcccaagcctgtctttcccagcgtcatgtttgtgtcacaaaagcagttattttaaaatctgatcccctctctaccctaccactttggtttgaattatctcctgggttattttggttcatttgggtggggatcaaagtcctgtccaccaccaaaactaagttcttagattttgggggattttttttttaaacgatgagaagggaatccggttatgttgatttctagtgtacaagatactgtctgctgggggtctgtattttttattttttgaccaactgtatggaangttgtcagtaaacctttgaaaaagatggatttttaanctgttcanantctggttantcatcagctaaanatcgaaaaatccctagngatgtcnnnaaggcctagtnntnttncagcaccatggtganggtnctntcgncnncattnttaggtcagtggantnanttaccnctttttntggtganaaggaacttnntttgggtggga

SEQ ID NO: 362 - DNA, 1293 bp, Homo Sapiens
  misc_feature (93)..(93): n is a, c, g, or t
  misc_feature (97)..(98): n is a, c, g, or t
  misc_feature (101)..(102): n is a, c, g, or t
  misc_feature (104)..(104): n is a, c, g, or t
  misc_feature (106)..(106): n is a, c, g, or t
  misc_feature (108)..(108): n is a, c, g, or t
  misc_feature (117)..(117): n is a, c, g, or t
  misc_feature (121)..(123): n is a, c, g, or t
  misc_feature (129)..(129): n is a, c, g, or t
  misc_feature (137)..(141): n is a, c, g, or t
  misc_feature (150)..(150): n is a, c, g, or t
  misc_feature (155)..(155): n is a, c, g, or t
  misc_feature (164)..(164): n is a, c, g, or t
  misc_feature (166)..(166): n is a, c, g, or t
  misc_feature (168)..(168): n is a, c, g, or t
  misc_feature (171)..(171): n is a, c, g, or t
  misc_feature (173)..(173): n is a, c, g, or t
  misc_feature (175)..(176): n is a, c, g, or t
  misc_feature (179)..(183): n is a, c, g, or t
  misc_feature (185)..(185): n is a, c, g, or t
  misc_feature (195)..(196): n is a, c, g, or t
  misc_feature (199)..(199): n is a, c, g, or t
  misc_feature (205)..(205): n is a, c, g, or t
  misc_feature (211)..(211): n is a, c, g, or t
  misc_feature (214)..(214): n is a, c, g, or t
  misc_feature (231)..(232): n is a, c, g, or t
  misc_feature (234)..(234): n is a, c, g, or t
  misc_feature (236)..(236): n is a, c, g, or t
  misc_feature (240)..(240): n is a, c, g, or t
  misc_feature (247)..(247): n is a, c, g, or t
  misc_feature (249)..(249): n is a, c, g, or t
  misc_feature (254)..(254): n is a, c, g, or t
  misc_feature (263)..(264): n is a, c, g, or t
  misc_feature (267)..(267): n is a, c, g, or t
  misc_feature (270)..(272): n is a, c, g, or t
  misc_feature (275)..(277): n is a, c, g, or t
  misc_feature (281)..(282): n is a, c, g, or t
  misc_feature (284)..(284): n is a, c, g, or t
  misc_feature (289)..(289): n is a, c, g, or t
  misc_feature (291)..(292): n is a, c, g, or t
  misc_feature (296)..(296): n is a, c, g, or t
  misc_feature (302)..(302): n is a, c, g, or t
  misc_feature (310)..(310): n is a, c, g, or t
  misc_feature (316)..(316): n is a, c, g, or t
  misc_feature (326)..(326): n is a, c, g, or t
  misc_feature (329)..(329): n is a, c, g, or t
  misc_feature (363)..(363): n is a, c, g, or t
  misc_feature (365)..(365): n is a, c, g, or t
  misc_feature (369)..(369): n is a, c, g, or t
  misc_feature (377)..(377): n is a, c, g, or t
  misc_feature (379)..(379): n is a, c, g, or t
  misc_feature (381)..(381): n is a, c, g, or t
  misc_feature (383)..(383): n is a, c, g, or t
  misc_feature (386)..(386): n is a, c, g, or t
  misc_feature (388)..(390): n is a, c, g, or t
  misc_feature (392)..(394): n is a, c, g, or t
  misc_feature (396)..(396): n is a, c, g, or t
  misc_feature (409)..(409): n is a, c, g, or t
  misc_feature (413)..(415): n is a, c, g, or t
  misc_feature (423)..(425): n is a, c, g, or t
  misc_feature (430)..(430): n is a, c, g, or t
  misc_feature (436)..(436): n is a, c, g, or t
  misc_feature (438)..(439): n is a, c, g, or t
  misc_feature (442)..(442): n is a, c, g, or t
  misc_feature (464)..(464): n is a, c, g, or t
  misc_feature (471)..(471): n is a, c, g, or t
  misc_feature (500)..(500): n is a, c, g, or t
  misc_feature (537)..(537): n is a, c, g, or t
  misc_feature (540)..(540): n is a, c, g, or t
  misc_feature (579)..(579): n is a, c, g, or t
  misc_feature (584)..(584): n is a, c, g, or t
  misc_feature (592)..(592): n is a, c, g, or t
  misc_feature (594)..(594): n is a, c, g, or t
  misc_feature (597)..(597): n is a, c, g, or t
  misc_feature (610)..(610): n is a, c, g, or t
  misc_feature (627)..(627): n is a, c, g, or t
  misc_feature (631)..(632): n is a, c, g, or t
  misc_feature (643)..(643): n is a, c, g, or t
  misc_feature (647)..(647): n is a, c, g, or t
  misc_feature (649)..(649): n is a, c, g, or t
  misc_feature (654)..(654): n is a, c, g, or t
  misc_feature (657)..(657): n is a, c, g, or t
  misc_feature (686)..(686): n is a, c, g, or t
  misc_feature (689)..(689): n is a, c, g, or t
  misc_feature (692)..(692): n is a, c, g, or t
  misc_feature (694)..(694): n is a, c, g, or t
  misc_feature (714)..(715): n is a, c, g, or t
  misc_feature (734)..(734): n is a, c, g, or t
  misc_feature (750)..(750): n is a, c, g, or t
  misc_feature (753)..(753): n is a, c, g, or t
  misc_feature (756)..(756): n is a, c, g, or t
  misc_feature (763)..(764): n is a, c, g, or t
  misc_feature (770)..(771): n is a, c, g, or t
  misc_feature (777)..(778): n is a, c, g, or t
  misc_feature (781)..(781): n is a, c, g, or t
  misc_feature (787)..(787): n is a, c, g, or t
  misc_feature (790)..(790): n is a, c, g, or t
  misc_feature (797)..(797): n is a, c, g, or t
  misc_feature (802)..(802): n is a, c, g, or t
  misc_feature (805)..(805): n is a, c, g, or t
  misc_feature (812)..(812): n is a, c, g, or t
  misc_feature (815)..(815): n is a, c, g, or t
  misc_feature (819)..(819): n is a, c, g, or t
  misc_feature (822)..(822): n is a, c, g, or t
  misc_feature (825)..(826): n is a, c, g, or t
  misc_feature (829)..(829): n is a, c, g, or t
  misc_feature (837)..(837): n is a, c, g, or t
  misc_feature (860)..(860): n is a, c, g, or t
  misc_feature (866)..(866): n is a, c, g, or t
  misc_feature (868)..(868): n is a, c, g, or t
  misc_feature (888)..(888): n is a, c, g, or t
  misc_feature (890)..(891): n is a, c, g, or t
  misc_feature (893)..(893): n is a, c, g, or t
  misc_feature (896)..(896): n is a, c, g, or t
  misc_feature (903)..(903): n is a, c, g, or t
  misc_feature (908)..(908): n is a, c, g, or t
  misc_feature (927)..(927): n is a, c, g, or t
  misc_feature (931)..(931): n is a, c, g, or t
  misc_feature (944)..(944): n is a, c, g, or t
  misc_feature (949)..(949): n is a, c, g, or t
  misc_feature (955)..(955): n is a, c, g, or t
  misc_feature (957)..(957): n is a, c, g, or t
  misc_feature (964)..(964): n is a, c, g, or t
  misc_feature (971)..(971): n is a, c, g, or t
  misc_feature (983)..(983): n is a, c, g, or t
  misc_feature (987)..(987): n is a, c, g, or t
  misc_feature (989)..(990): n is a, c, g, or t
  misc_feature (998)..(999): n is a, c, g, or t
  misc_feature (1005)..(1005): n is a, c, g, or t
  misc_feature (1011)..(1011): n is a, c, g, or t
  misc_feature (1013)..(1013): n is a, c, g, or t
  misc_feature (1022)..(1022): n is a, c, g, or t
  misc_feature (1025)..(1025): n is a, c, g, or t
  misc_feature (1032)..(1033): n is a, c, g, or t
  misc_feature (1037)..(1037): n is a, c, g, or t
  misc_feature (1042)..(1042): n is a, c, g, or t
  misc_feature (1050)..(1050): n is a, c, g, or t
  misc_feature (1053)..(1053): n is a, c, g, or t
  misc_feature (1063)..(1063): n is a, c, g, or t
  misc_feature (1067)..(1067): n is a, c, g, or t
  misc_feature (1075)..(1075): n is a, c, g, or t
  misc_feature (1077)..(1077): n is a, c, g, or t
  misc_feature (1084)..(1084): n is a, c, g, or t
  misc_feature (1100)..(1101): n is a, c, g, or t
  misc_feature (1112)..(1112): n is a, c, g, or t
  misc_feature (1114)..(1114): n is a, c, g, or t
  misc_feature (1116)..(1116): n is a, c, g, or t
  misc_feature (1119)..(1119): n is a, c, g, or t
  misc_feature (1122)..(1122): n is a, c, g, or t
  misc_feature (1132)..(1133): n is a, c, g, or t
  misc_feature (1135)..(1137): n is a, c, g, or t
  misc_feature (1140)..(1140): n is a, c, g, or t
  misc_feature (1144)..(1146): n is a, c, g, or t
  misc_feature (1152)..(1152): n is a, c, g, or t
  misc_feature (1167)..(1168): n is a, c, g, or t
  misc_feature (1173)..(1173): n is a, c, g, or t
  misc_feature (1175)..(1175): n is a, c, g, or t
  misc_feature (1178)..(1178): n is a, c, g, or t
  misc_feature (1184)..(1184): n is a, c, g, or t
  misc_feature (1187)..(1189): n is a, c, g, or t
  misc_feature (1192)..(1192): n is a, c, g, or t
  misc_feature (1199)..(1201): n is a, c, g, or t
  misc_feature (1204)..(1204): n is a, c, g, or t
  misc_feature (1209)..(1209): n is a, c, g, or t
  misc_feature (1215)..(1215): n is a, c, g, or t
  misc_feature (1217)..(1218): n is a, c, g, or t
  misc_feature (1222)..(1230): n is a, c, g, or t
  misc_feature (1232)..(1234): n is a, c, g, or t
  misc_feature (1236)..(1236): n is a, c, g, or t
  misc_feature (1239)..(1242): n is a, c, g, or t
  misc_feature (1246)..(1248): n is a, c, g, or t
  misc_feature (1255)..(1255): n is a, c, g, or t
  misc_feature (1257)..(1258): n is a, c, g, or t
  misc_feature (1261)..(1261): n is a, c, g, or t
  misc_feature (1263)..(1273): n is a, c, g, or t
  misc_feature (1277)..(1281): n is a, c, g, or t
  misc_feature (1284)..(1285): n is a, c, g, or t
  misc_feature (1288)..(1291): n is a, c, g, or t
  misc_feature (1293)..(1293): n is a, c, g, or t
aatagagaaattactatgagaggatcgcatcaccatcaccatcacggatcctatttaggtgacactatagaatcgtcgacccacgcgtccggngganngtnncngntntcagatgcngaannnagaacntggctgtnnnnnccagcccanccagncttggttgngntncancncnnaannnnngngtgacttggnnacnagctcngcattnttntcgctgcattttcctgnnantnaacnattccgntncaagnctgttaaanngantgnnntannncatnnangtacntnnttcnagattntcttatangtgctnatgtcattcncantcggatgtatagtcgacagggctgttgaaaattncngttnaggatgangnancnttntnnntnnntntatgagatgaagntggnnntccagccnnnaatgnatgccngnnacntatcctcgaggctgatgcctgntccaggnaaacccgcagtctgtctctgcgcttatgntccacccggagcatggcaactaccagggatgctggancgngtgcgagcataatttcttcgtattgttaacaactagatngcggnttcacctngncancaaagaaccagangctcactgggattgacnggcnncaggcgtacanagcncnggtgnaanaggacctgagaaggcgctgggtgacgctnccnccngnctttgtatgaacacaatgcnnctgatgcacaaccaacaantccacaagaaacttgnctncangaacaanntcacgnngaatgnnatntaagcngcncatggcncctanttntcacacntgntacnggngcnnaangtacaggngacaccgtattctggcaaggtgntgggcntngacaaaaacctaggctcccntnncngangggacgnatagnacgcattcctcctacactngtantccccgctctggncagcncaaatnancttgaantgatctncaaaaaggctcngcangnncttttgcnngaattntccaancncccagtgcngtnaatgccnnaatnagcgnggcttccnaanccaggggatnctgnctgggcangnaaaagtnttccagaggggaaaannccggaagaccnangnttngtntgaggcggannannntgnaatnnnctgggnaagaaaatttcccannaccgnantcntttaanccnnnggnggaaatnnnaanccccntgcaananncccnnnnnnnnntnnnanggnnnncccnnnggccctngnnccncnnnnnnnnnnnaaannnnnttnnaannnngn

SEQ ID NO: 363 - DNA, 1389 bp, Homo Sapiens
  misc_feature (1)..(1): n is a, c, g, or t
  misc_feature (857)..(857): n is a, c, g, or t
  misc_feature (907)..(907): n is a, c, g, or t
  misc_feature (926)..(926): n is a, c, g, or t
  misc_feature (931)..(931): n is a, c, g, or t
  misc_feature (940)..(940): n is a, c, g, or t
  misc_feature (988)..(988): n is a, c, g, or t
  misc_feature (993)..(993): n is a, c, g, or t
  misc_feature (1004)..(1004): n is a, c, g, or t
  misc_feature (1015)..(1015): n is a, c, g, or t
  misc_feature (1025)..(1025): n is a, c, g, or t
  misc_feature (1028)..(1028): n is a, c, g, or t
  misc_feature (1036)..(1036): n is a, c, g, or t
  misc_feature (1052)..(1052): n is a, c, g, or t
  misc_feature (1068)..(1068): n is a, c, g, or t
  misc_feature (1074)..(1074): n is a, c, g, or t
  misc_feature (1076)..(1076): n is a, c, g, or t
  misc_feature (1082)..(1082): n is a, c, g, or t
  misc_feature (1086)..(1086): n is a, c, g, or t
  misc_feature (1089)..(1090): n is a, c, g, or t
  misc_feature (1093)..(1093): n is a, c, g, or t
  misc_feature (1101)..(1101): n is a, c, g, or t
  misc_feature (1107)..(1107): n is a, c, g, or t
  misc_feature (1116)..(1116): n is a, c, g, or t
  misc_feature (1118)..(1118): n is a, c, g, or t
  misc_feature (1120)..(1120): n is a, c, g, or t
  misc_feature (1126)..(1126): n is a, c, g, or t
  misc_feature (1139)..(1140): n is a, c, g, or t
  misc_feature (1143)..(1143): n is a, c, g, or t
  misc_feature (1146)..(1146): n is a, c, g, or t
  misc_feature (1150)..(1151): n is a, c, g, or t
  misc_feature (1153)..(1153): n is a, c, g, or t
  misc_feature (1155)..(1156): n is a, c, g, or t
  misc_feature (1164)..(1165): n is a, c, g, or t
  misc_feature (1170)..(1170): n is a, c, g, or t
  misc_feature (1175)..(1175): n is a, c, g, or t
  misc_feature (1178)..(1178): n is a, c, g, or t
  misc_feature (1183)..(1183): n is a, c, g, or t
  misc_feature (1206)..(1206): n is a, c, g, or t
  misc_feature (1221)..(1221): n is a, c, g, or t
  misc_feature (1226)..(1227): n is a, c, g, or t
  misc_feature (1234)..(1234): n is a, c, g, or t
  misc_feature (1237)..(1237): n is a, c, g, or t
  misc_feature (1239)..(1240): n is a, c, g, or t
  misc_feature (1243)..(1243): n is a, c, g, or t
  misc_feature (1250)..(1252): n is a, c, g, or t
  misc_feature (1260)..(1260): n is a, c, g, or t
  misc_feature (1263)..(1263): n is a, c, g, or t
  misc_feature (1268)..(1268): n is a, c, g, or t
  misc_feature (1270)..(1270): n is a, c, g, or t
  misc_feature (1273)..(1274): n is a, c, g, or t
  misc_feature (1284)..(1284): n is a, c, g, or t
  misc_feature (1290)..(1290): n is a, c, g, or t
  misc_feature (1294)..(1294): n is a, c, g, or t
  misc_feature (1317)..(1318): n is a, c, g, or t
  misc_feature (1320)..(1321): n is a, c, g, or t
  misc_feature (1324)..(1324): n is a, c, g, or t
  misc_feature (1330)..(1330): n is a, c, g, or t
  misc_feature (1332)..(1334): n is a, c, g, or t
  misc_feature (1343)..(1343): n is a, c, g, or t
  misc_feature (1348)..(1348): n is a, c, g, or t
  misc_feature (1358)..(1361): n is a, c, g, or t
  misc_feature (1363)..(1365): n is a, c, g, or t
  misc_feature (1369)..(1370): n is a, c, g, or t
  misc_feature (1374)..(1375): n is a, c, g, or t
  misc_feature (1382)..(1382): n is a, c, g, or t
  misc_feature (1384)..(1385): n is a, c, g, or t
  misc_feature (1387)..(1387): n is a, c, g, or t
  misc_feature (1389)..(1389): n is a, c, g, or t
ngagagattactatgagaggatcgcatcaccatcaccatcacggatcctatttaggtgacactatagaatcgtcgacccacgcgtccgcgcatccccagaaaagacgctacagcaagggcggcgcctgccggggcttgggggacgaccaccgccccgaggaccggggcttcggggtgcagagactgcggtccaaggcccagaacaaggagaacttcaggccggcctcctccgcggagcccgccgtgcagaaactggcgagcctgcggctgggcggggccgagccccggttgctgcgttgggacttgaccttctccccgccccagaaatccttgcctgtcgctctagagtccgacgaggagaatggggatgagctcaagtccagtacgggctcagcgcctatcctggtggtcatggtgatcttgctcaacatcggagtcgccattctgtttattaactttttcatctgatgagatgtcgcggtagcaaaaatagagaaagggtagaaaaaagggacattaaaattaaaagcaaaaccacaagaagggaaagaccgcaactcggacagcccagcgacttccaagtcctctcacagaagaaccacacgattgggtatcactcacagtttgcctttttttctgggtaatgttttttggattttagccaaaattctttgcttgtataacactctgctgtgtggcatggcagaaggaggccagcacgcagcccctccagctccacgtggagacagaagggatcccggcacatcagtggtaacagcggacgttgtcctcgtggtcacacgtcccgtcttgggtgtggatggagggcagcccggggcagaacctcagccccgcgnccctgagtggcagggctgactcccgtcgacacgagcttaaaaagtggatncactgctttctctgtctanaacanacgggtganaagtatgggccagaagcatggggcagggtggcccaccccagtgggcantaacntggcctttttntgtgtgaaatntgtgctgccnacntgaggganggggagggatcggccncctcctcctgtgaaanggatgnangtcttncctnttnnggnatgccccnggcttncatgaaaancnantccccncccgattttaaannaanccntttnntntnngcccctcnnggggnccatncgntgttncccccaaaccaggaacggggccntccatccctggtcantaaannaaacaanggntnnccngaaatgnnncccccggnctnggggncnttnntaagggaacngggttntttnccaaaaggccaaaaccttccggnntnnccngttttntnnnggggccccntcccnaaaaattttnnnncnnncccnngggnncaaaaanannantn

SEQ ID NO: 364 - DNA, 1438 bp, Homo Sapiens
  misc_feature (2)..(2): n is a, c, g, or t
  misc_feature (14)..(15): n is a, c, g, or t
  misc_feature (19)..(19): n is a, c, g, or t
  misc_feature (26)..(26): n is a, c, g, or t
  misc_feature (28)..(28): n is a, c, g, or t
  misc_feature (53)..(53): n is a, c, g, or t
  misc_feature (55)..(55): n is a, c, g, or t
  misc_feature (71)..(71): n is a, c, g, or t
  misc_feature (102)..(103): n is a, c, g, or t
  misc_feature (113)..(113): n is a, c, g, or t
  misc_feature (115)..(116): n is a, c, g, or t
  misc_feature (122)..(122): n is a, c, g, or t
  misc_feature (124)..(124): n is a, c, g, or t
  misc_feature (132)..(132): n is a, c, g, or t
  misc_feature (135)..(135): n is a, c, g, or t
  misc_feature (141)..(141): n is a, c, g, or t
  misc_feature (146)..(146): n is a, c, g, or t
  misc_feature (157)..(157): n is a, c, g, or t
  misc_feature (161)..(161): n is a, c, g, or t
  misc_feature (170)..(170): n is a, c, g, or t
  misc_feature (172)..(172): n is a, c, g, or t
  misc_feature (176)..(176): n is a, c, g, or t
  misc_feature (179)..(179): n is a, c, g, or t
  misc_feature (181)..(181): n is a, c, g, or t
  misc_feature (184)..(184): n is a, c, g, or t
  misc_feature (189)..(189): n is a, c, g, or t
  misc_feature (192)..(192): n is a, c, g, or t
  misc_feature (198)..(198): n is a, c, g, or t
  misc_feature (203)..(203): n is a, c, g, or t
  misc_feature (206)..(206): n is a, c, g, or t
  misc_feature (215)..(215): n is a, c, g, or t
  misc_feature (226)..(227): n is a, c, g, or t
  misc_feature (238)..(239): n is a, c, g, or t
  misc_feature (243)..(243): n is a, c, g, or t
  misc_feature (246)..(246): n is a, c, g, or t
  misc_feature (249)..(250): n is a, c, g, or t
  misc_feature (269)..(269): n is a, c, g, or t
  misc_feature (277)..(278): n is a, c, g, or t
  misc_feature (291)..(291): n is a, c, g, or t
  misc_feature (297)..(297): n is a, c, g, or t
  misc_feature (306)..(307): n is a, c, g, or t
  misc_feature (319)..(319): n is a, c, g, or t
  misc_feature (325)..(325): n is a, c, g, or t
  misc_feature (341)..(342): n is a, c, g, or t
  misc_feature (356)..(356): n is a, c, g, or t
  misc_feature (359)..(359): n is a, c, g, or t
  misc_feature (361)..(361): n is a, c, g, or t
  misc_feature (364)..(364): n is a, c, g, or t
  misc_feature (368)..(368): n is a, c, g, or t
  misc_feature (370)..(371): n is a, c, g, or t
  misc_feature (374)..(375): n is a, c, g, or t
  misc_feature (395)..(395): n is a, c, g, or t
  misc_feature (402)..(402): n is a, c, g, or t
  misc_feature (407)..(408): n is a, c, g, or t
  misc_feature (417)..(419): n is a, c, g, or t
  misc_feature (422)..(422): n is a, c, g, or t
  misc_feature (426)..(426): n is a, c, g, or t
  misc_feature (428)..(428): n is a, c, g, or t
  misc_feature (430)..(430): n is a, c, g, or t
  misc_feature (433)..(435): n is a, c, g, or t
  misc_feature (437)..(437): n is a, c, g, or t
  misc_feature (475)..(475): n is a, c, g, or t
  misc_feature (477)..(477): n is a, c, g, or t
  misc_feature (481)..(481): n is a, c, g, or t
  misc_feature (486)..(486): n is a, c, g, or t
  misc_feature (489)..(489): n is a, c, g, or t
  misc_feature (491)..(491): n is a, c, g, or t
  misc_feature (502)..(502): n is a, c, g, or t
  misc_feature (508)..(508): n is a, c, g, or t
  misc_feature (511)..(513): n is a, c, g, or t
  misc_feature (520)..(520): n is a, c, g, or t
  misc_feature (523)..(523): n is a, c, g, or t
  misc_feature (528)..(528): n is a, c, g, or t
  misc_feature (532)..(532): n is a, c, g, or t
  misc_feature (539)..(539): n is a, c, g, or t
  misc_feature (547)..(547): n is a, c, g, or t
  misc_feature (554)..(554): n is a, c, g, or t
  misc_feature (556)..(556): n is a, c, g, or t
  misc_feature (564)..(564): n is a, c, g, or t
  misc_feature (569)..(570): n is a, c, g, or t
  misc_feature (586)..(587): n is a, c, g, or t
  misc_feature (595)..(595): n is a, c, g, or t
  misc_feature (599)..(599): n is a, c, g, or t
  misc_feature (602)..(602): n is a, c, g, or t
  misc_feature (611)..(611): n is a, c, g, or t
  misc_feature (617)..(617): n is a, c, g, or t
  misc_feature (636)..(636): n is a, c, g, or t
  misc_feature (640)..(640): n is a, c, g, or t
  misc_feature (642)..(642): n is a, c, g, or t
  misc_feature (646)..(648): n is a, c, g, or t
  misc_feature (650)..(651): n is a, c, g, or t
  misc_feature (659)..(659): n is a, c, g, or t
  misc_feature (666)..(666): n is a, c, g, or t
  misc_feature (668)..(668): n is a, c, g, or t
  misc_feature (670)..(670): n is a, c, g, or t
  misc_feature (673)..(673): n is a, c, g, or t
  misc_feature (675)..(675): n is a, c, g, or t
  misc_feature (682)..(682): n is a, c, g, or t
  misc_feature (685)..(685): n is a, c, g, or t
  misc_feature (698)..(698): n is a, c, g, or t
  misc_feature (704)..(704): n is a, c, g, or t
  misc_feature (708)..(708): n is a, c, g, or t
  misc_feature (717)..(717): n is a, c, g, or t
  misc_feature (720)..(720): n is a, c, g, or t
  misc_feature (722)..(723): n is a, c, g, or t
  misc_feature (725)..(726): n is a, c, g, or t
  misc_feature (728)..(729): n is a, c, g, or t
  misc_feature (739)..(740): n is a, c, g, or t
  misc_feature (742)..(744): n is a, c, g, or t
  misc_feature (747)..(747): n is a, c, g, or t
  misc_feature (771)..(771): n is a, c, g, or t
  misc_feature (773)..(773): n is a, c, g, or t
  misc_feature (778)..(778): n is a, c, g, or t
  misc_feature (795)..(795): n is a, c, g, or t
  misc_feature (804)..(804): n is a, c, g, or t
  misc_feature (809)..(809): n is a, c, g, or t
  misc_feature (814)..(814): n is a, c, g, or t
  misc_feature (816)..(818): n is a, c, g, or t
  misc_feature (828)..(828): n is a, c, g, or t
  misc_feature (831)..(832): n is a, c, g, or t
  misc_feature (837)..(837): n is a, c, g, or t
  misc_feature (840)..(840): n is a, c, g, or t
  misc_feature (844)..(844): n is a, c, g, or t
  misc_feature (855)..(855): n is a, c, g, or t
  misc_feature (857)..(857): n is a, c, g, or t
  misc_feature (868)..(869): n is a, c, g, or t
  misc_feature (872)..(872): n is a, c, g, or t
  misc_feature (877)..(877): n is a, c, g, or t
  misc_feature (880)..(880): n is a, c, g, or t
  misc_feature (886)..(886): n is a, c, g, or t
  misc_feature (892)..(893): n is a, c, g, or t
  misc_feature (895)..(895): n is a, c, g, or t
  misc_feature (900)..(900): n is a, c, g, or t
  misc_feature (902)..(903): n is a, c, g, or t
  misc_feature (907)..(907): n is a, c, g, or t
  misc_feature (916)..(917): n is a, c, g, or t
  misc_feature (919)..(919): n is a, c, g, or t
  misc_feature (921)..(921): n is a, c, g, or t
  misc_feature (925)..(925): n is a, c, g, or t
  misc_feature (929)..(929): n is a, c, g, or t
  misc_feature (935)..(936): n is a, c, g, or t
  misc_feature (940)..(940): n is a, c, g, or t
  misc_feature (944)..(945): n is a, c, g, or t
  misc_feature (948)..(950): n is a, c, g, or t
  misc_feature (954)..(955): n is a, c, g, or t
  misc_feature (958)..(958): n is a, c, g, or t
  misc_feature (960)..(961): n is a, c, g, or t
  misc_feature (970)..(970): n is a, c, g, or t
  misc_feature (974)..(975): n is a, c, g, or t
  misc_feature (977)..(977): n is a, c, g, or t
  misc_feature (983)..(983): n is a, c, g, or t
  misc_feature (988)..(988): n is a, c, g, or t
  misc_feature (991)..(991): n is a, c, g, or t
  misc_feature (994)..(994): n is a, c, g, or t
  misc_feature (997)..(998): n is a, c, g, or t
  misc_feature (1001)..(1002): n is a, c, g, or t
  misc_feature (1004)..(1004): n is a, c, g, or t
  misc_feature (1006)..(1006): n is a, c, g, or t
  misc_feature (1008)..(1008): n is a, c, g, or t
  misc_feature (1018)..(1018): n is a, c, g, or t
  misc_feature (1022)..(1022): n is a, c, g, or t
  misc_feature (1030)..(1032): n is a, c, g, or t
  misc_feature (1036)..(1038): n is a, c, g, or t
  misc_feature (1048)..(1048): n is a, c, g, or t
  misc_feature (1050)..(1050): n is a, c, g, or t
  misc_feature (1053)..(1053): n is a, c, g, or t
  misc_feature (1056)..(1056): n is a, c, g, or t
  misc_feature (1058)..(1058): n is a, c, g, or t
  misc_feature (1060)..(1060): n is a, c, g, or t
  misc_feature (1063)..(1063): n is a, c, g, or t
  misc_feature (1067)..(1067): n is a, c, g, or t
  misc_feature (1072)..(1076): n is a, c, g, or t
  misc_feature (1081)..(1083): n is a, c, g, or t
  misc_feature (1092)..(1093): n is a, c, g, or t
  misc_feature (1095)..(1096): n is a, c, g, or t
  misc_feature (1106)..(1106): n is a, c, g, or t
  misc_feature (1108)..(1108): n is a, c, g, or t
  misc_feature (1110)..(1111): n is a, c, g, or t
  misc_feature (1120)..(1120): n is a, c, g, or t
  misc_feature (1125)..(1125): n is a, c, g, or t
  misc_feature (1131)..(1131): n is a, c, g, or t
  misc_feature (1135)..(1135): n is a, c, g, or t
  misc_feature (1138)..(1139): n is a, c, g, or t
  misc_feature (1143)..(1143): n is a, c, g, or t
  misc_feature (1147)..(1147): n is a, c, g, or t
  misc_feature (1149)..(1149): n is a, c, g, or t
  misc_feature (1154)..(1155): n is a, c, g, or t
  misc_feature (1157)..(1157): n is a, c, g, or t
  misc_feature (1168)..(1168): n is a, c, g, or t
  misc_feature (1170)..(1172): n is a, c, g, or t
  misc_feature (1184)..(1185): n is a, c, g, or t
  misc_feature (1190)..(1193): n is a, c, g, or t
  misc_feature (1197)..(1197): n is a, c, g, or t
  misc_feature (1201)..(1201): n is a, c, g, or t
  misc_feature (1205)..(1205): n is a, c, g, or t
  misc_feature (1207)..(1207): n is a, c, g, or t
  misc_feature (1209)..(1211): n is a, c, g, or t
  misc_feature (1216)..(1216): n is a, c, g, or t
  misc_feature (1219)..(1225): n is a, c, g, or t
  misc_feature (1227)..(1228): n is a, c, g, or t
  misc_feature (1232)..(1232): n is a, c, g, or t
  misc_feature (1236)..(1236): n is a, c, g, or t
  misc_feature (1240)..(1240): n is a, c, g, or t
  misc_feature (1242)..(1242): n is a, c, g, or t
  misc_feature (1250)..(1250): n is a, c, g, or t
  misc_feature (1258)..(1258): n is a, c, g, or t
  misc_feature (1262)..(1262): n is a, c, g, or t
  misc_feature (1266)..(1266): n is a, c, g, or t
  misc_feature (1277)..(1277): n is a, c, g, or t
  misc_feature (1280)..(1281): n is a, c, g, or t
  misc_feature (1284)..(1286): n is a, c, g, or t
  misc_feature (1292)..(1292): n is a, c, g, or t
  misc_feature (1297)..(1297): n is a, c, g, or t
  misc_feature (1311)..(1311): n is a, c, g, or t
  misc_feature (1315)..(1315): n is a, c, g, or t
  misc_feature (1317)..(1319): n is a, c, g, or t
  misc_feature (1321)..(1322): n is a, c, g, or t
  misc_feature (1328)..(1328): n is a, c, g, or t
  misc_feature (1331)..(1332): n is a, c, g, or t
  misc_feature (1336)..(1339): n is a, c, g, or t
  misc_feature (1341)..(1341): n is a, c, g, or t
  misc_feature (1343)..(1343): n is a, c, g, or t
  misc_feature (1349)..(1349): n is a, c, g, or t
  misc_feature (1362)..(1364): n is a, c, g, or t
  misc_feature (1366)..(1366): n is a, c, g, or t
  misc_feature (1385)..(1385): n is a, c, g, or t
  misc_feature (1393)..(1393): n is a, c, g, or t
  misc_feature (1395)..(1395): n is a, c, g, or t
  misc_feature (1397)..(1397): n is a, c, g, or t
  misc_feature (1399)..(1400): n is a, c, g, or t
  misc_feature (1404)..(1404): n is a, c, g, or t
  misc_feature (1406)..(1408): n is a, c, g, or t
  misc_feature (1410)..(1410): n is a, c, g, or t
  misc_feature (1414)..(1414): n is a, c, g, or t
  misc_feature (1416)..(1418): n is a, c, g, or t
  misc_feature (1420)..(1420): n is a, c, g, or t
  misc_feature (1429)..(1429): n is a, c, g, or t
  misc_feature (1433)..(1433): n is a, c, g, or t
cncaaacaaatagnngganattacgnangaggaggatcgcatcccccttcacncntcacggatcctatttnggtgacactatagaatcgtcgacccacgcgnnccgacctttntnngatgangnaaaaaagnaanatgatnattgncttggtccccntggngttcgtcangntctngtntnacngagtnganccctgnagttntcntctgagacnccctgcttggnncaatttatttnngagnttncannaacagtctctaacccctcngacatatnnattaatttgcccnttgatntctcgcacnncatgtgtaagangtttcngggtctcggagttgtnngagcctgcaggacnatncngangtgnanntgnntccacgatgtcaatgtactnctctatncgacnnagaaaatcnnncanattnananctnnncnttgagaaggacacgcaaacatccgacccaggcatatgnanctanttcangancnaactcagaaanttcatnctnnnggcactnatntcggnatanaccaaanactgagcntggatgncntcaccccngcccnnaacaagtactccgtgnnacactttnaaanacncccagtgantacccnacattactccacactcgangtcnangaannncnncagctaanggacgcncntncancngaagccngcngcactgatcatanctctcngaanttgcctctngangnncnntnngggcgacttnngnnncgnacattaaaaaagacaaaatggacnancgttntacatcactctttactngcactgacncttangaccntnnncaagccttgnctnnttccnatntcgnacaaagtggancnttccttatgtnntangaccnttnaccgtnccccanngnccgangnnagtnttttcccanngncncccntccncaattnntccngggnnagnnnccannatntnnaccttcccngaannanttctcnaccanccnccnctnnttnnangntnccccgagctnaatngtaaattnnntaannnaaatcccttntntanaantntnccncaanccccnnnnnccctnnnttgaaaccnncnnctattaaggncncnngtttttccnaaaanccctcncccnccnnaaancacnanggtcnntncctccccttgncnnngattttaagacnnttcannnnaatnatcntgtngntnnntccanttnnnnnnncnntttntacntttnanacacacanttagcctntagnttcnttcttctctcnaannggnnngttttnggtgnagcctaaaactccnctcncnnncnnttaacnctnnatcnnnncncnttattngccaatctttcannnanaaaactttctccctctaantaattaananantnnttcncnnnanaccngnnntntcttatccncccncccgc

SEQ ID NO: 365 - DNA, 256 bp, Homo Sapiens
gttttcccagaaacccccagaggacttccacttatatctcactggcaagagctggatcacccagccactcccagcagcaagggaggcaggaaaggaagtgtttaactttccctgcctccctagtggaatggggaaaggaagaagggcttgggtgtgtgtaagtcacccagaagctcggccatcagctctgcagctcccctagctgtctccttgactttggccagactctgggtcaaacctgggacctctggagccc

SEQ ID NO: 366 - DNA, 256 bp, Homo Sapiens
ttaactatgagaggatcgcatcaccatcaccatcacggatcctatttaggtgacactatagaatcgtcgacccacgcgtccggatcctgaaccgcgcggccgaaccctccggtgtcccgacccaggctaagcttgagcatggctgagcaggagcccacagccgagcagctggcccagattgcagcggagaacgaggaggatgagcactcggtcaactacaagcccccggcccagaagagcatccaggagatccagg

SEQ ID NO: 367 - DNA, 256 bp, Homo Sapiens
taagaggagaattaactatgagaggatcgcatcaccatcaccatcacggatcctatttaggtgacactatagaatcgtcgacccacgcgtccggggaacagaaggccaagaggaacagccagtgggtacccaccctgcccaacagctcccaccacttagatgccgtgccatgctccacaaccatcaacaggaaccgcatgggccgagacaagaagagaaccttccccctttgctttgatgaccatgacccagctgt

SEQ ID NO: 368 - DNA, 256 bp, Homo Sapiens
  misc_feature (11)..(11): n is a, c, g, or t
  misc_feature (14)..(15): n is a, c, g, or t
  misc_feature (19)..(19): n is a, c, g, or t
  misc_feature (26)..(26): n is a, c, g, or t
  misc_feature (31)..(32): n is a, c, g, or t
  misc_feature (36)..(36): n is a, c, g, or t
  misc_feature (40)..(41): n is a, c, g, or t
  misc_feature (43)..(44): n is a, c, g, or t
  misc_feature (46)..(47): n is a, c, g, or t
  misc_feature (53)..(53): n is a, c, g, or t
  misc_feature (58)..(58): n is a, c, g, or t
  misc_feature (60)..(61): n is a, c, g, or t
  misc_feature (63)..(63): n is a, c, g, or t
  misc_feature (67)..(67): n is a, c, g, or t
  misc_feature (72)..(73): n is a, c, g, or t
  misc_feature (76)..(76): n is a, c, g, or t
  misc_feature (85)..(85): n is a, c, g, or t
  misc_feature (88)..(92): n is a, c, g, or t
  misc_feature (94)..(94): n is a, c, g, or t
  misc_feature (96)..(96): n is a, c, g, or t
  misc_feature (98)..(101): n is a, c, g, or t
  misc_feature (122)..(122): n is a, c, g, or t
  misc_feature (127)..(129): n is a, c, g, or t
  misc_feature (132)..(132): n is a, c, g, or t
  misc_feature (134)..(135): n is a, c, g, or t
  misc_feature (139)..(139): n is a, c, g, or t
  misc_feature (142)..(142): n is a, c, g, or t
  misc_feature (144)..(145): n is a, c, g, or t
  misc_feature (150)..(151): n is a, c, g, or t
  misc_feature (157)..(157): n is a, c, g, or t
  misc_feature (160)..(161): n is a, c, g, or t
  misc_feature (165)..(165): n is a, c, g, or t
  misc_feature (167)..(170): n is a, c, g, or t
  misc_feature (174)..(175): n is a, c, g, or t
  misc_feature (182)..(182): n is a, c, g, or t
  misc_feature (184)..(187): n is a, c, g, or t
  misc_feature (191)..(191): n is a, c, g, or t
  misc_feature (194)..(196): n is a, c, g, or t
  misc_feature (203)..(203): n is a, c, g, or t
  misc_feature (211)..(211): n is a, c, g, or t
  misc_feature (215)..(215): n is a, c, g, or t
  misc_feature (220)..(220): n is a, c, g, or t
  misc_feature (226)..(226): n is a, c, g, or t
  misc_feature (229)..(229): n is a, c, g, or t
  misc_feature (231)..(231): n is a, c, g, or t
  misc_feature (239)..(239): n is a, c, g, or t
  misc_feature (242)..(242): n is a, c, g, or t
  misc_feature (246)..(246): n is a, c, g, or t
  misc_feature (252)..(252): n is a, c, g, or t
ttttctttttnttnntctnttttttnttttnntttntttnngnngnngtgggnagggnanngnccgngttgnnttntacgggggnggnnnnngngntnnnnggagggggtttctgtttcacntgtcnnnttntnngggngtncnntattnngtgggnagnntatnannnngttnntttttcncnnnntggntcnnntttttantatcttanttanttagnattctnttntnttttttanagnatgncttttntttt

SEQ ID NO: 369 - DNA, 1407 bp, Homo Sapiens
  misc_feature (2)..(2): n is a, c, g, or t
  misc_feature (929)..(929): n is a, c, g, or t
  misc_feature (941)..(941): n is a, c, g, or t
  misc_feature (954)..(954): n is a, c, g, or t
  misc_feature (959)..(959): n is a, c, g, or t
  misc_feature (964)..(964): n is a, c, g, or t
  misc_feature (966)..(966): n is a, c, g, or t
  misc_feature (968)..(968): n is a, c, g, or t
  misc_feature (971)..(971): n is a, c, g, or t
  misc_feature (987)..(987): n is a, c, g, or t
  misc_feature (1002)..(1002): n is a, c, g, or t
  misc_feature (1024)..(1024): n is a, c, g, or t
  misc_feature (1026)..(1028): n is a, c, g, or t
  misc_feature (1050)..(1050): n is a, c, g, or t
  misc_feature (1054)..(1054): n is a, c, g, or t
  misc_feature (1058)..(1058): n is a, c, g, or t
  misc_feature (1060)..(1060): n is a, c, g, or t
  misc_feature (1074)..(1074): n is a, c, g, or t
  misc_feature (1085)..(1085): n is a, c, g, or t
  misc_feature (1096)..(1096): n is a, c, g, or t
  misc_feature (1101)..(1101): n is a, c, g, or t
  misc_feature (1110)..(1110): n is a, c, g, or t
  misc_feature (1113)..(1113): n is a, c, g, or t
  misc_feature (1116)..(1116): n is a, c, g, or t
  misc_feature (1120)..(1120): n is a, c, g, or t
  misc_feature (1125)..(1125): n is a, c, g, or t
  misc_feature (1128)..(1129): n is a, c, g, or t
  misc_feature (1131)..(1131): n is a, c, g, or t
  misc_feature (1136)..(1136): n is a, c, g, or t
  misc_feature (1142)..(1142): n is a, c, g, or t
  misc_feature (1144)..(1144): n is a, c, g, or t
  misc_feature (1148)..(1148): n is a, c, g, or t
  misc_feature (1155)..(1156): n is a, c, g, or t
  misc_feature (1158)..(1158): n is a, c, g, or t
  misc_feature (1163)..(1163): n is a, c, g, or t
  misc_feature (1166)..(1166): n is a, c, g, or t
  misc_feature (1170)..(1170): n is a, c, g, or t
  misc_feature (1173)..(1173): n is a, c, g, or t
  misc_feature (1179)..(1179): n is a, c, g, or t
  misc_feature (1181)..(1182): n is a, c, g, or t
  misc_feature (1187)..(1187): n is a, c, g, or t
  misc_feature (1194)..(1194): n is a, c, g, or t
  misc_feature (1196)..(1196): n is a, c, g, or t
  misc_feature (1200)..(1200): n is a, c, g, or t
  misc_feature (1205)..(1205): n is a, c, g, or t
  misc_feature (1218)..(1219): n is a, c, g, or t
  misc_feature (1221)..(1221): n is a, c, g, or t
  misc_feature (1224)..(1224): n is a, c, g, or t
  misc_feature (1233)..(1233): n is a, c, g, or t
  misc_feature (1237)..(1238): n is a, c, g, or t
  misc_feature (1242)..(1242): n is a, c, g, or t
  misc_feature (1247)..(1247): n is a, c, g, or t
  misc_feature (1249)..(1251): n is a, c, g, or t
  misc_feature (1255)..(1255): n is a, c, g, or t
  misc_feature (1257)..(1257): n is a, c, g, or t
  misc_feature (1259)..(1260): n is a, c, g, or t
  misc_feature (1262)..(1262): n is a, c, g, or t
  misc_feature (1267)..(1267): n is a, c, g, or t
  misc_feature (1272)..(1274): n is a, c, g, or t
  misc_feature (1277)..(1277): n is a, c, g, or t
  misc_feature (1279)..(1279): n is a, c, g, or t
  misc_feature (1281)..(1281): n is a, c, g, or t
  misc_feature (1283)..(1283): n is a, c, g, or t
  misc_feature (1285)..(1285): n is a, c, g, or t
  misc_feature (1288)..(1290): n is a, c, g, or t
  misc_feature (1292)..(1292): n is a, c, g, or t
  misc_feature (1297)..(1297): n is a, c, g, or t
  misc_feature (1303)..(1303): n is a, c, g, or t
  misc_feature (1306)..(1313): n is a, c, g, or t
  misc_feature (1316)..(1317): n is a, c, g, or t
  misc_feature (1319)..(1321): n is a, c, g, or t
  misc_feature (1323)..(1327): n is a, c, g, or t
  misc_feature (1333)..(1334): n is a, c, g, or t
  misc_feature (1336)..(1336): n is a, c, g, or t
  misc_feature (1338)..(1338): n is a, c, g, or t
  misc_feature (1340)..(1342): n is a, c, g, or t
  misc_feature (1346)..(1348): n is a, c, g, or t
  misc_feature (1350)..(1352): n is a, c, g, or t
  misc_feature (1357)..(1363): n is a, c, g, or t
  misc_feature (1366)..(1366): n is a, c, g, or t
  misc_feature (1370)..(1373): n is a, c, g, or t
  misc_feature (1383)..(1388): n is a, c, g, or t
  misc_feature (1407)..(1407): n is a, c, g, or t
antagagaaattactatgagaggatcgcatcaccatcaccatcacggatcctatttaggtgacactatagaatcgtcgacccacgcgtccgtgggttctcccgattatggcaactcagccctgctcagcttgcctggctaccgccccaccactcgcagttctgctcgtcgttcccaggccggggtgtccagtggggcccctccaggaaggaacagcttctacatgggcacttgccaggatgagcctgagcagctggatgactggaaccgcattgcagagctgcagcagcgcaatcgagtgtgccccccacatctgaagacctgctatcccctggagtccaggccttccctgagcctgggcaccatcacagatgaggagatgaaaactggagacccccaagagaccctgcgccgagccagcatgcagccaatccagatagccgagggcactggcatcaccacccggcagcagcgcaaacgggtctccctagagccccaccagggccctggaactcctgagtctaagaaggccaccagctgtttcccacgccccatgactccccgagaccgacatgaagggcgcaaacagagcactactgaggcccagaagaaagcagctccagcttctactaaacaggctgaccggcgccagtcgatggccttcagcatcctcaacacacccaagaagctagggaacagccttctgcggcggggagcctcaaagaaggccctgtccaaggcttcccccaacactcgcagtggaacccgccgttctccgcgcattgccaccaccacagccagcgccgccactgctgccgccattggtgccacccctcgagccaagggcaaggcaaaagcactaaagggccagtaccagtgagtggccccacctgtgtccccgatgctgccgtcacctggtcctccgcctantgtccctctcantgccttctctcanctccnagccnanantanccaaacccctaaaaanagtgatgcctgcccncaccctggcctggtcctggtcntnnntgggccttttcgaactggccangggnctgnanatgaaaggggggcnctctcctactngcccctttttntaaanaaatccttntcntcnaacnaattnagnngntttanggtggncntggnctggcanntnctttnccnttgnttnaagggncnnaaaanaaagccngnttcngtttntgggggggggccnnanggnccccttttnaatnnaaanggttnannngggnancnncnaaaanttttnnnaanangncntnttnnnanggggngggaanttnnnnnnnnccnntnnnannnnngggggnntngngnnntttnnngnnnttttnnnnnnnaantttnnnnaaaaaaaaannnnnnttttttttttttttttttn

SEQ ID NO: 370 - DNA, 256 bp, Homo Sapiens
  misc_feature (2)..(2): n is a, c, g, or t
tnagaggagaaattaactatgagaggatcgcatcaccatcaccatcacggatcctatttaggtgacactatagaatcgtcgacccacgcgtccgatggattcaagcctcgtgaacgaagcggtggggagcaggcacaggactgggatgctctgccacccaagcggccccgactaggggcaggaaacaagatcggaggccgtaggcttattgtggtgctggaaggggccagtctggagacagtcaaggtagggaaga

SEQ ID NO: 371 - DNA, 256 bp, Homo Sapiens
cgatgagggggtgtcctcaagcccctggaggagctccccacctttcccccgcccccgtcatccgggctgagaatgctggagcgagccgcattcatcctcagtgcgaaggccttgacattaggacacgcccgataaatgtgtaccttagtgaagaaatgagcaatctttagcctccgaagtattaggattcgtgtggcccaggattatgggttattaagtgtagggctcactgagccccatcattacttgatggggg

SEQ ID NO: 372 - DNA, 1214 bp, Homo Sapiens
  misc_feature (843)..(844): n is a, c, g, or t
  misc_feature (846)..(848): n is a, c, g, or t
  misc_feature (851)..(856): n is a, c, g, or t
  misc_feature (858)..(916): n is a, c, g, or t
  misc_feature (924)..(924): n is a, c, g, or t
  misc_feature (926)..(926): n is a, c, g, or t
  misc_feature (931)..(931): n is a, c, g, or t
  misc_feature (939)..(939): n is a, c, g, or t
  misc_feature (943)..(943): n is a, c, g, or t
  misc_feature (946)..(946): n is a, c, g, or t
  misc_feature (954)..(954): n is a, c, g, or t
  misc_feature (959)..(959): n is a, c, g, or t
  misc_feature (965)..(965): n is a, c, g, or t
  misc_feature (967)..(967): n is a, c, g, or t
  misc_feature (972)..(972): n is a, c, g, or t
  misc_feature (979)..(981): n is a, c, g, or t
  misc_feature (983)..(983): n is a, c, g, or t
  misc_feature (1017)..(1017): n is a, c, g, or t
  misc_feature (1019)..(1019): n is a, c, g, or t
  misc_feature (1023)..(1023): n is a, c, g, or t
  misc_feature (1030)..(1030): n is a, c, g, or t
  misc_feature (1045)..(1046): n is a, c, g, or t
  misc_feature (1054)..(1054): n is a, c, g, or t
  misc_feature (1059)..(1059): n is a, c, g, or t
  misc_feature (1062)..(1062): n is a, c, g, or t
  misc_feature (1066)..(1066): n is a, c, g, or t
  misc_feature (1071)..(1071): n is a, c, g, or t
  misc_feature (1077)..(1078): n is a, c, g, or t
  misc_feature (1083)..(1083): n is a, c, g, or t
  misc_feature (1094)..(1094): n is a, c, g, or t
  misc_feature (1096)..(1096): n is a, c, g, or t
  misc_feature (1098)..(1098): n is a, c, g, or t
  misc_feature (1100)..(1100): n is a, c, g, or t
  misc_feature (1102)..(1102): n is a, c, g, or t
  misc_feature (1112)..(1113): n is a, c, g, or t
  misc_feature (1119)..(1119): n is a, c, g, or t
  misc_feature (1123)..(1125): n is a, c, g, or t
  misc_feature (1135)..(1135): n is a, c, g, or t
  misc_feature (1139)..(1139): n is a, c, g, or t
  misc_feature (1144)..(1144): n is a, c, g, or t
  misc_feature (1148)..(1148): n is a, c, g, or t
  misc_feature (1155)..(1155): n is a, c, g, or t
  misc_feature (1160)..(1160): n is a, c, g, or t
  misc_feature (1166)..(1166): n is a, c, g, or t
  misc_feature (1169)..(1169): n is a, c, g, or t
  misc_feature (1172)..(1172): n is a, c, g, or t
  misc_feature (1175)..(1175): n is a, c, g, or t
  misc_feature (1179)..(1179): n is a, c, g, or t
  misc_feature (1187)..(1187): n is a, c, g, or t
  misc_feature (1209)..(1209): n is a, c, g, or t
  misc_feature (1213)..(1213): n is a, c, g, or t
tagagaaattactatgagaggatcgcatcaccatcaccatcacggatcctatttaggtgacactatagaatcgtcgacccacgcgttccgccgcagacccacccgatggcatcaaggtctttcccaacgaggaggacctcaccgacctccaggtcaccatcgagggccctgaggggaccccatatgctggaggtctgttccgcatgaaactcctgctggggaaggacttccctgcctccccacccaagggctacttcctgaccaagatcttccacccgaacgtgggcgccaatggcgagatctgcgtcaacgtgctcaagagggactggacggctgagctgggcatccgacacgtactgctgaccatcaagtgcctgctgatccaccctaaccccgagtctgcactcaacgaggaggcgggccgcctgctcttggagaactacgaggagtatgcagctcgggcccgtctgctcacagagatccacgggggcgccggcgggcccagcggcagggccgaagccggtcgggccctggccagtggcactgaagcttcctccaccgaccctggggccccagggggcccgggaggggctgagggtcccatggccaagaagcatgctggcgagcgcgataagaagctggcggccaagaaaaagacggacaagaagcgggcgctgcggcggctgtagtgggctctcttcctccttccaccgtgaccccaacctctcctgtcccctccctccaactctgtctctaagttatttaaattatggctggggtcggggaagggtacagggggcactgggacctggatttgtttttctaaataaagttggaaaagcnnannnaannnnnnannnnnnnnnnnnnnnnnnnnnnnnnnnnnnnnnnnnnnnnnnnnnnnnnnnnnnnnnnnggggggcncnccctnagggagcnaatnaantttaatantgaantggacncngttgnaaaaccnnnangaccccaaactccttttgtttttttaaaaccttngntgcnccggggnttttttttggggaannccaccttnttggnaantttngggantaggannttatnggaaaaaaatntngntnanccccgtttanntcccanggcnnnaaaaaatttngggntttcncgtngcaagantaaanaacgtnggnggnatncgcnttttaaanaaaaaaaaaaaaaatttttccntttnt

SEQ ID NO: 373 - DNA, 256 bp, Homo Sapiens; identical to SEQ ID NO: 70

SEQ ID NO: 374 - DNA, 1193 bp, Homo Sapiens
  misc_feature (1)..(1): n is a, c, g, or t
  misc_feature (836)..(836): n is a, c, g, or t
  misc_feature (867)..(867): n is a, c, g, or t
  misc_feature (921)..(921): n is a, c, g, or t
  misc_feature (923)..(923): n is a, c, g, or t
  misc_feature (929)..(929): n is a, c, g, or t
  misc_feature (932)..(932): n is a, c, g, or t
  misc_feature (947)..(947): n is a, c, g, or t
  misc_feature (955)..(955): n is a, c, g, or t
  misc_feature (965)..(966): n is a, c, g, or t
  misc_feature (981)..(981): n is a, c, g, or t
  misc_feature (995)..(995): n is a, c, g, or t
  misc_feature (1007)..(1007): n is a, c, g, or t
  misc_feature (1017)..(1017): n is a, c, g, or t
  misc_feature (1023)..(1023): n is a, c, g, or t
  misc_feature (1033)..(1033): n is a, c, g, or t
  misc_feature (1046)..(1046): n is a, c, g, or t
  misc_feature (1054)..(1055): n is a, c, g, or t
  misc_feature (1065)..(1065): n is a, c, g, or t
  misc_feature (1068)..(1068): n is a, c, g, or t
  misc_feature (1071)..(1071): n is a, c, g, or t
  misc_feature (1080)..(1080): n is a, c, g, or t
  misc_feature (1083)..(1083): n is a, c, g, or t
  misc_feature (1103)..(1103): n is a, c, g, or t
  misc_feature (1125)..(1125): n is a, c, g, or t
  misc_feature (1132)..(1132): n is a, c, g, or t
  misc_feature (1136)..(1136): n is a, c, g, or t
  misc_feature (1141)..(1141): n is a, c, g, or t
  misc_feature (1148)..(1148): n is a, c, g, or t
  misc_feature (1152)..(1152): n is a, c, g, or t
  misc_feature (1154)..(1154): n is a, c, g, or t
  misc_feature (1162)..(1162): n is a, c, g, or t
  misc_feature (1166)..(1166): n is a, c, g, or t
  misc_feature (1172)..(1172): n is a, c, g, or t
  misc_feature (1183)..(1183): n is a, c, g, or t
  misc_feature (1188)..(1188): n is a, c, g, or t
  misc_feature (1190)..(1190): n is a, c, g, or t
  misc_feature (1193)..(1193): n is a, c, g, or t
naattagagaaattactatgagaggatcgcatcaccatcaccatcacggatcctatttaggtgacactatagaatcgtcgacccacgcgtccggcaggcggcagccagagctgcgcgccgcggcggcggaagatggctgcggccgaggtggcggacactcagctgatgcttggagtcgggctgatcgtgaccatctttccaccgtagaaaaggacacaaatggagaagttctgtgggtgtggtgttatccttccacgacagccacattaaggaacctgctgctgagaaaatgctgccttacagatgaaaacaaacttctccatccctttgtctttggtcagtacagaagaacatggttttatatcacaacaattgaagttccagattcttccattttgaaaaaggtgactcatttttctattgtcctgaccgccaaagattttaacccagagaagtatgctgccttcactaggatattgtgtagaatgtacctgaaacatgggagcccagttaaaatgatggagagttatattgcagttctcacaaaggggatatgccagagtgaagaaaacggctctttccttagtaaggattttgatgcccgaaaggcctacctggctggctccatcaaagacattgtatctcagtttggaatggaaactgttatcttacacacagcactgatgctaaagaaaagaattgtggtgtatcaccccaagatagaagcggtccaggagttcaccaggactctgcctgccctggtgtggcaccgacaggactggaccatccttcactcttacgtgcacctcaacgccgatgagctggaagccctgcanatgtgcacaggttacgtcgctggatttgtanacttggaggtgagcaacagaccagacctctatgatgtgtttgtgaatctggcananagtganatnaccattgctcccctngcaaaaangccatggcanngggcaactgcccaanaaatggtcacctantgttcagctgcnaagatccaanaatcanaagcccgttntacggaaattgcntaaacaannaaatcttacnacntancccttttcnaanttcggtgaggaaaaaaaagncttatttgagcctaagcaaacnattcccnccanaaaanttctttntctnanccccccanaagngaaatngatgggaaaancttcntnaan

SEQ ID NO: 375 - DNA, 256 bp, Homo Sapiens
  misc_feature (18)..(18): n is a, c, g, or t
cttaaagaggagaattanctatgcagaggtatcgcatcaccatcaccatcacgggatcctatttaggtgacactatagaatcgtcgacccacgcgtccgattttaaatccagctccatacaacgctccgccgccgctgctgccgcgacccggactgcgcgccagcacccccctgccgacagctccgtcactatggaggatatgaacgagtacagcaatatagaggaattcgcagagggatccaagatcaacgcgag

SEQ ID NO: 376 - DNA, 1192 bp, Homo Sapiens
  misc_feature (1)..(1): n is a, c, g, or t
  misc_feature (3)..(3): n is a, c, g, or t
  misc_feature (857)..(857): n is a, c, g, or t
  misc_feature (870)..(870): n is a, c, g, or t
  misc_feature (897)..(897): n is a, c, g, or t
  misc_feature (899)..(899): n is a, c, g, or t
  misc_feature (922)..(922): n is a, c, g, or t
  misc_feature (958)..(958): n is a, c, g, or t
  misc_feature (978)..(978): n is a, c, g, or t
  misc_feature (981)..(982): n is a, c, g, or t
  misc_feature (998)..(998): n is a, c, g, or t
  misc_feature (1006)..(1006): n is a, c, g, or t
  misc_feature (1015)..(1015): n is a, c, g, or t
  misc_feature (1040)..(1040): n is a, c, g, or t
  misc_feature (1044)..(1044): n is a, c, g, or t
  misc_feature (1046)..(1046): n is a, c, g, or t
  misc_feature (1049)..(1049): n is a, c, g, or t
  misc_feature (1051)..(1051): n is a, c, g, or t
  misc_feature (1061)..(1061): n is a, c, g, or t
  misc_feature (1065)..(1065): n is a, c, g, or t
  misc_feature (1067)..(1067): n is a, c, g, or t
  misc_feature (1079)..(1079): n is a, c, g, or t
  misc_feature (1083)..(1083): n is a, c, g, or t
  misc_feature (1087)..(1087): n is a, c, g, or t
  misc_feature (1090)..(1090): n is a, c, g, or t
  misc_feature (1115)..(1115): n is a, c, g, or t
  misc_feature (1123)..(1123): n is a, c, g, or t
  misc_feature (1135)..(1135): n is a, c, g, or t
  misc_feature (1154)..(1192): n is a, c, g, or t
nantagagaaattactatgagaggatcgcatcaccatcaccatcacggatcctatttaggtgacactatagaatcgtcgacccacgcgtccgagaaaccagaaaaaaaagtgaagaagtctgactgtggagaatggcagtggagtgtgtgtgtgcccaccagtggagactgtgggctgggcacacgggagggcactcggactggagctgagtgcaagcaaaccatgaagacccagagatgtaagatcccctgcaactggaagaagcaatttggcgcggagtgcaaataccagttccaggcctggggagaatgtgacctgaacacagccctgaagaccagaactggaagtctgaagcgagccctgcacaatgccgaatgccagaagactgtcaccatctccaagccctgtggcaaactgaccaagcccaaacctcaagcagaatctaagaagaagaaaaaggaaggcaagaaacaggagaagatgctggattaaaagatgtcacctgtggaacataaaaaggacatcagcaaacaggatcagttaactattgcatttatatgtaccgtaggctttgtattcaaaaattatctatagctaagtacacaataagcaaaaacaaaaagaaaagaaaatttttgtagtagcgttttttaaatgtatactatagtaccagtaggggcttataataaaggactgtaatcttatttaggaagttgacttatagtacatgataaatgatagacaattgaggtaagttttttgaaattatgtgacattttacattaaattttttttacattttttgggcagcaatttaaatgttatgactatgtaaactacttctcttgttaggtanttttttcacctanatttttttcccaattgagaaaaatatntnctaaacaaaatagcattaaaacntaatccctctatttgaaaaaatatcttgtttttgcnataaattttttaaaatgtantcnncaaatgggggtggggnaacaaacntgtccaatncatgttgacttttttttttttaaanaaancnttnanacttaaattntttncntttggcaaaacntttntttnctngaaaaattttttttccctctggggnaaaaattnttggaaaataantccggggggttctgaaaannnnnnnnnnnnnnnnnnnnnnnnnnnnnnnnnnnnnnn

SEQ ID NO: 377 - DNA, 1235 bp, Homo Sapiens
  misc_feature (936)..(936): n is a, c, g, or t
  misc_feature (1005)..(1005): n is a, c, g, or t
  misc_feature (1041)..(1041): n is a, c, g, or t
  misc_feature (1068)..(1068): n is a, c, g, or t
  misc_feature (1082)..(1082): n is a, c, g, or t
  misc_feature (1098)..(1098): n is a, c, g, or t
  misc_feature (1103)..(1103): n is a, c, g, or t
  misc_feature (1112)..(1112): n is a, c, g, or t
  misc_feature (1120)..(1120): n is a, c, g, or t
  misc_feature (1125)..(1125): n is a, c, g, or t
  misc_feature (1131)..(1132): n is a, c, g, or t
  misc_feature (1137)..(1138): n is a, c, g, or t
  misc_feature (1149)..(1149): n is a, c, g, or t
  misc_feature (1156)..(1156): n is a, c, g, or t
  misc_feature (1165)..(1165): n is a, c, g, or t
  misc_feature (1171)..(1171): n is a, c, g, or t
  misc_feature (1176)..(1176): n is a, c, g, or t
  misc_feature (1180)..(1180): n is a, c, g, or t
  misc_feature (1184)..(1184): n is a, c, g, or t
  misc_feature (1189)..(1190): n is a, c, g, or t
  misc_feature (1198)..(1199): n is a, c, g, or t
  misc_feature (1209)..(1209): n is a, c, g, or t
  misc_feature (1222)..(1222): n is a, c, g, or t
  misc_feature (1226)..(1226): n is a, c, g, or t
  misc_feature (1228)..(1230): n is a, c, g, or t
tagagaaattactatgagaggatcgcatcaccatcaccatcacggatcctatttaggtgacactatagaatcgtcgacccacgcgtccgcgccgcccaagatgccgaaaggaaagaaggccaagggaaagaaggtggctccggccccagctgtcgtgaagaagcaggaggctaagaaagtggtgaatcccctgtttgagaaaaggcctaagaattttggcattggacaggacatccagcccaaaagagacctcacccgctttgtgaaatggccccgctatatcaggttgcagcggcagagagccatcctctataagcggctgaaagtgcctcctgcgattaaccagttcacccaggccctggaccgccaaacagctactcagctgcttaagctggcccacaagtacagaccagagacaaagcaagagaagaagcagagactgttggcccgggccgagaagaaggctgctggcaaaggggacgtcccaacgaagagaccacctgtccttcgagcaggagttaacaccgtcaccaccttggtggagaacaagaaagctcagctggtggtgattgcacacgacgtggatcccatcgagctggttgtcttcttgcctgccctgtgtcgtaaaatgggggtcccttactgcattatcaagggaaaggcaagactgggacgtctagtccacaggaagacctgcaccactgtcgccttcacacaggtgaactcggaagacaaaggcgctttggctaagctggtggaagctatcaggaccaattacaatgacagatacgatgagatccgccgtcactggggtggcaatgtcctgggtcctaagtctgtggctcgtatcgccaagctcgaaaaggcaaaggctaaagaacttgccactaaactgggttaaatgtacactgttgagttttctgtacataaaaatanttgaaataatacaaattttccttcaaaaaaaaaaaaaaggggggccgccgcaaccatgaccgtggagtncgaggaggcgtcaaggactccccgcgcttcagggcnacattgacaaagtggaaacggacttgntggaaattgagccnaactggaaacctggtnaactntgcatggcntggggaancggtnagcctnntcacnncacaggttttntgagggntcccgactntccaanatgcngggnaccnttttnngaattttnnaagttcttancctagaaggggantccntnnnctttg

SEQ ID NO: 378 - DNA, 1200 bp, Homo Sapiens
  misc_feature (822)..(822): n is a, c, g, or t
  misc_feature (903)..(904): n is a, c, g, or t
  misc_feature (913)..(913): n is a, c, g, or t
  misc_feature (945)..(945): n is a, c, g, or t
  misc_feature (956)..(956): n is a, c, g, or t
  misc_feature (958)..(958): n is a, c, g, or t
  misc_feature (960)..(960): n is a, c, g, or t
  misc_feature (964)..(964): n is a, c, g, or t
  misc_feature (981)..(981): n is a, c, g, or t
  misc_feature (990)..(990): n is a, c, g, or t
  misc_feature (996)..(996): n is a, c, g, or t
  misc_feature (1001)..(1001): n is a, c, g, or t
  misc_feature (1010)..(1010): n is a, c, g, or t
  misc_feature (1014)..(1014): n is a, c, g, or t
  misc_feature (1020)..(1020): n is a, c, g, or t
  misc_feature (1065)..(1065): n is a, c, g, or t
  misc_feature (1071)..(1071): n is a, c, g, or t
  misc_feature (1076)..(1076): n is a, c, g, or t
  misc_feature (1082)..(1082): n is a, c, g, or t
  misc_feature (1096)..(1097): n is a, c, g, or t
  misc_feature (1100)..(1100): n is a, c, g, or t
  misc_feature (1109)..(1109): n is a, c, g, or t
  misc_feature (1120)..(1120): n is a, c, g, or t
  misc_feature (1126)..(1126): n is a, c, g, or t
  misc_feature (1130)..(1130): n is a, c, g, or t
  misc_feature (1144)..(1144): n is a, c, g, or t
  misc_feature (1148)..(1148): n is a, c, g, or t
  misc_feature (1151)..(1151): n is a, c, g, or t
  misc_feature (1154)..(1154): n is a, c, g, or t
  misc_feature (1157)..(1158): n is a, c, g, or t
  misc_feature (1162)..(1162): n is a, c, g, or t
  misc_feature (1164)..(1165): n is a, c, g, or t
  misc_feature (1170)..(1170): n is a, c, g, or t
  misc_feature (1181)..(1181): n is a, c, g, or t
  misc_feature (1189)..(1189): n is a, c, g, or t
  misc_feature (1193)..(1193): n is a, c, g, or t
  misc_feature (1195)..(1197): n is a, c, g, or t
  misc_feature (1200)..(1200): n is a, c, g, or t
gagaaattactatgagaggatcgcatcaccatcaccatcacggatcctatttaggtgacactatagaatcgtcgacccacgcgtccggggtgcgggtcgctatggcggtggacatcacgctgctattccgggccagcgtcaagaccgtgaagacgcggaacaaggcgctgggagtggcggtgggcggcggggtcgatggcagccgggacgagctgttccgccggagcccccggcccaagggcgacttctccagccgggcccgcgaagtgatttctcacattggcaaactgagagattttcttctggaacacaggaaagattatattaatgcttatagccataccatgtctgaatatgggaggatgacagacacagaacgagaccagatagaccaggatgcccagatattcatgaggacctgttcagaagcaattcagcaactacgaacagaagctcacaaggagatacattcccagcaagtgaaggagcacaggaccgctgttttggatttcattgaagattacttgaaaagagtatgtaaactttactcagaacagagagccatccgagttaaaagagtggtggataagaaaagattatctaagctggaaccagaaccaaatacaaagacaagagaatccacatcttctgagaaagtttcacagagtccttcaaaagactctgaagaaaaccctgccactgaagaacgtccagaaaaaattttggctgaaacacaacctgaattgggaacgtggggagatggcaaaggcgaagatgagttatccccagaagaaatacaaatgtttgaacaggaaaaatcancgactaattggtgaaatgaacagcttgtttgatgaagtgaggcaaatcgaagggagagtggttgagatttccagactccannagatattcncggaaaaggttttgcaacaggaagctgaaatngacagcattcncnanttanttgtggggggcaactgnaaaatatcnaggganggcancgaaaaacntaanagaagncctttaaaaacaacgctgggcttccccgggggggatccccctccntccccnggganggggcncccttccccttgcnnctncccccaacngggaacaaacngctaancccngggcccccgggggncccnccnaanaanntccntnntgggncccccaaaaangggggggntttncnnnaan

SEQ ID NO: 379 - DNA, 1298 bp, Homo Sapiens
  misc_feature (5)..(7): n is a, c, g, or t
  misc_feature (12)..(12): n is a, c, g, or t
  misc_feature (345)..(345): n is a, c, g, or t
  misc_feature (361)..(361): n is a, c, g, or t
  misc_feature (429)..(429): n is a, c, g, or t
  misc_feature (475)..(475): n is a, c, g, or t
  misc_feature (496)..(496): n is a, c, g, or t
  misc_feature (505)..(505): n is a, c, g, or t
  misc_feature (520)..(520): n is a, c, g, or t
  misc_feature (531)..(531): n is a, c, g, or t
  misc_feature (534)..(534): n is a, c, g, or t
  misc_feature (538)..(539): n is a, c, g, or t
  misc_feature (541)..(541): n is a, c, g, or t
  misc_feature (545)..(545): n is a, c, g, or t
  misc_feature (552)..(553): n is a, c, g, or t
  misc_feature (558)..(558): n is a, c, g, or t
  misc_feature (562)..(562): n is a, c, g, or t
  misc_feature (568)..(568): n is a, c, g, or t
  misc_feature (570)..(570): n is a, c, g, or t
  misc_feature (572)..(572): n is a, c, g, or t
  misc_feature (581)..(581): n is a, c, g, or t
  misc_feature (588)..(588): n is a, c, g, or t
  misc_feature (592)..(592): n is a, c, g, or t
  misc_feature (598)..(598): n is a, c, g, or t
  misc_feature (601)..(602): n is a, c, g, or t
  misc_feature (604)..(606): n is a, c, g, or t
  misc_feature (608)..(608): n is a, c, g, or t
  misc_feature (614)..(615): n is a, c, g, or t
  misc_feature (617)..(617): n is a, c, g, or t
  misc_feature (620)..(622): n is a, c, g, or t
  misc_feature (624)..(624): n is a, c, g, or t
  misc_feature (629)..(629): n is a, c, g, or t
  misc_feature (632)..(632): n is a, c, g, or t
  misc_feature (638)..(638): n is a, c, g, or t
  misc_feature (640)..(640): n is a, c, g, or t
  misc_feature (643)..(645): n is a, c, g, or t
  misc_feature (647)..(647): n is a, c, g, or t
  misc_feature (651)..(652): n is a, c, g, or t
  misc_feature (656)..(656): n is a, c, g, or t
  misc_feature (659)..(659): n is a, c, g, or t
  misc_feature (661)..(663): n is a, c, g, or t
  misc_feature (667)..(667): n is a, c, g, or t
  misc_feature (670)..(675): n is a, c, g, or t
  misc_feature (679)..(679): n is a, c, g, or t
  misc_feature (683)..(683): n is a, c, g, or t
  misc_feature (685)..(687): n is a, c, g, or t
  misc_feature (690)..(691): n is a, c, g, or t
  misc_feature (693)..(693): n is a, c, g, or t
  misc_feature (697)..(700): n is a, c, g, or t
  misc_feature (703)..(703): n is a, c, g, or t
  misc_feature (706)..(707): n is a, c, g, or t
  misc_feature (710)..(710): n is a, c, g, or t
  misc_feature (713)..(714): n is a, c, g, or t
  misc_feature (716)..(721): n is a, c, g, or t
  misc_feature (723)..(725): n is a, c, g, or t
  misc_feature (727)..(727): n is a, c, g, or t
  misc_feature (730)..(730): n is a, c, g, or t
  misc_feature (732)..(733): n is a, c, g, or t
  misc_feature (736)..(737): n is a, c, g, or t
  misc_feature (739)..(743): n is a, c, g, or t
  misc_feature (745)..(746): n is a, c, g, or t
  misc_feature (748)..(748): n is a, c, g, or t
  misc_feature (751)..(752): n is a, c, g, or t
  misc_feature (754)..(758): n is a, c, g, or t
  misc_feature (761)..(764): n is a, c, g, or t
  misc_feature (767)..(767): n is a, c, g, or t
  misc_feature (771)..(771): n is a, c, g, or t
  misc_feature (773)..(776): n is a, c, g, or t
  misc_feature (779)..(781): n is a, c, g, or t
  misc_feature (784)..(785): n is a, c, g, or t
  misc_feature (788)..(790): n is a, c, g, or t
  misc_feature (792)..(795): n is a, c, g, or t
  misc_feature (797)..(798): n is a, c, g, or t
  misc_feature (800)..(801): n is a, c, g, or t
  misc_feature (803)..(811): n is a, c, g, or t
  misc_feature (815)..(818): n is a, c, g, or t
  misc_feature (820)..(827): n is a, c, g, or t
  misc_feature (829)..(830): n is a, c, g, or t
  misc_feature (832)..(833): n is a, c, g, or t
  misc_feature (837)..(838): n is a, c, g, or t
  misc_feature (843)..(848): n is a, c, g, or t
  misc_feature (850)..(865): n is a, c, g, or t
  misc_feature (867)..(868): n is a, c, g, or t
  misc_feature (870)..(882): n is a, c, g, or t
  misc_feature (885)..(887): n is a, c, g, or t
  misc_feature (889)..(891): n is a, c, g, or t
  misc_feature (893)..(902): n is a, c, g, or t
  misc_feature (905)..(921): n is a, c, g, or t
  misc_feature (923)..(924): n is a, c, g, or t
  misc_feature (926)..(926): n is a, c, g, or t
  misc_feature (928)..(929): n is a, c, g, or t
  misc_feature (932)..(935): n is a, c, g, or t
  misc_feature (937)..(949): n is a, c, g, or t
  misc_feature (951)..(951): n is a, c, g, or t
  misc_feature (953)..(971): n is a, c, g, or t
  misc_feature (976)..(981): n is a, c, g, or t
  misc_feature (983)..(984): n is a, c, g, or t
  misc_feature (986)..(987): n is a, c, g, or t
  misc_feature (991)..(993): n is a, c, g, or t
  misc_feature (995)..(995): n is a, c, g, or t
  misc_feature (997)..(1002): n is a, c, g, or t
  misc_feature (1004)..(1004): n is a, c, g, or t
  misc_feature (1007)..(1023): n is a, c, g, or t
  misc_feature (1025)..(1032): n is a, c, g, or t
  misc_feature (1034)..(1035): n is a, c, g, or t
  misc_feature (1037)..(1053): n is a, c, g, or t
  misc_feature (1055)..(1064): n is a, c, g, or t
  misc_feature (1066)..(1071): n is a, c, g, or t
  misc_feature (1074)..(1078): n is a, c, g, or t
  misc_feature (1080)..(1084): n is a, c, g, or t
  misc_feature (1086)..(1092): n is a, c, g, or t
  misc_feature (1095)..(1099): n is a, c, g, or t
  misc_feature (1101)..(1103): n is a, c, g, or t
  misc_feature (1105)..(1113): n is a, c, g, or t
  misc_feature (1115)..(1118): n is a, c, g, or t
  misc_feature (1121)..(1127): n is a, c, g, or t
  misc_feature (1130)..(1133): n is a, c, g, or t
  misc_feature (1135)..(1138): n is a, c, g, or t
  misc_feature (1140)..(1140): n is a, c, g, or t
  misc_feature (1143)..(1156): n is a, c, g, or t
  misc_feature (1158)..(1158): n is a, c, g, or t
  misc_feature (1160)..(1160): n is a, c, g, or t
  misc_feature (1162)..(1162): n is a, c, g, or t
  misc_feature (1165)..(1169): n is a, c, g, or t
  misc_feature (1171)..(1176): n is a, c, g, or t
  misc_feature (1180)..(1180): n is a, c, g, or t
  misc_feature (1183)..(1195): n is a, c, g, or t
  misc_feature (1197)..(1200): n is a, c, g, or t
  misc_feature (1202)..(1210): n is a, c, g, or t
  misc_feature (1212)..(1222): n is a, c, g, or t
  misc_feature (1224)..(1232): n is a, c, g, or t
  misc_feature (1234)..(1244): n is a, c, g, or t
  misc_feature (1246)..(1269): n is a, c, g, or t
  misc_feature (1271)..(1285): n is a, c, g, or t
  misc_feature (1287)..(1290): n is a, c, g, or t
  misc_feature (1292)..(1298): n is a, c, g, or t
aaaannnagganaataactatgagaggatcgcatcaccatcaccatcacggatcctatttaggtgacactatagaatcgtcgacccacgcgtccggcgccctgtcctccgtcggctctgcgggctcccgggcctacagcggcctgcggcagaaatgcccctccgggctaggagcgacggcgccggcccgctatactcgcaccacctccccacctccccgctgcagaaagcgctgttggccgccggctccgcggcgatggcgctctataacccctaccgccacgacatggtcgcagttctaggggagaccacaggacaccgcaccctgaaggtcctcagggaccanatgaggagggatccanagggtgcccagatcctgcaggagcgtccccggatttcgacatccaccctcgacctgggcaagctccanagcctgccggaaggctccctcggtcgcgagtatctccgtttcctgnatgtgaacagggtctccccanacacccgancacccacccgcttcntggatgatganganctanngnatgngattcannggtancggnaggtgnananatgcttcanaccctgntggngatgcncannannntnctgggnnanatnnngntgaantgntttgangntgnnnanatgnnctgncangnnnatcntgnnnnnnttcnttgnannnatnnanttgnnnntanaanntgnaanngnnnnnntnnnanttnanncanngnnnnntnnanaanngnnnnnaannnncangtgncnnnnaannntannaannnannnnanngnnannnnnnnnntgannnntnnnnnnnnannanntagnnattannnnnnannnnnnnnnnnnnnnngnnannnnnnnnnnnnnaannnannnannnnnnnnnnaannnnnnnnnnnnnnnnntnntntnnaannnnannnnnnnnnnnnnanannnnnnnnnnnnnnnnnnnaaaannnnnnanntnnaaannntnannnnnnanttnnnnnnnnnnnnnnnnnannnnnnnnannannnnnnnnnnnnnnnnnannnnnnnnnnannnnnnttnnnnnannnnnannnnnnnaannnnnannnannnnnnnnnannnnaannnnnnnaannnnannnnanaannnnnnnnnnnnnnanananaannnnnannnnnnaaanaannnnnnnnnnnnnannnnannnnnnnnnannnnnnnnnnnannnnnnnnnannnnnnnnnnnannnnnnnnnnnnnnnnnnnnnnnnannnnnnnnnnnnnnnannnnannnnnnn

SEQ ID NO: 380 - DNA, 256 bp, Homo Sapiens
taagaggagaattaactatgagaggatcgcatcaccatcaccatcacggatcctatttaggtgacactatagaatcgtcgacccacgcgtccggtaccaacatgtcccgtggttccagcgccggttttgaccgccacattaccattttttcacccgagggtcggctctaccaagtagaatatgcttttaaggctattaaccagggtggccttacatcagtagctgtcagagggaaagactgtgcagtaattgtcac

SEQ ID NO: 381 - DNA, 1395 bp, Homo Sapiens
  misc_feature (842)..(842): n is a, c, g, or t
  misc_feature (865)..(865): n is a, c, g, or t
  misc_feature (868)..(868): n is a, c, g, or t
  misc_feature (871)..(871): n is a, c, g, or t
  misc_feature (877)..(877): n is a, c, g, or t
  misc_feature (879)..(879): n is a, c, g, or t
  misc_feature (899)..(899): n is a, c, g, or t
  misc_feature (933)..(933): n is a, c, g, or t
  misc_feature (940)..(940): n is a, c, g, or t
  misc_feature (949)..(949): n is a, c, g, or t
  misc_feature (953)..(953): n is a, c, g, or t
  misc_feature (955)..(955): n is a, c, g, or t
  misc_feature (957)..(957): n is a, c, g, or t
  misc_feature (993)..(993): n is a, c, g, or t
  misc_feature (995)..(995): n is a, c, g, or t
  misc_feature (999)..(999): n is a, c, g, or t
  misc_feature (1001)..(1001): n is a, c, g, or t
  misc_feature (1003)..(1004): n is a, c, g, or t
  misc_feature (1021)..(1021): n is a, c, g, or t
  misc_feature (1023)..(1023): n is a, c, g, or t
  misc_feature (1026)..(1027): n is a, c, g, or t
  misc_feature (1037)..(1038): n is a, c, g, or t
  misc_feature (1058)..(1058): n is a, c, g, or t
  misc_feature (1066)..(1066): n is a, c, g, or t
  misc_feature (1072)..(1072): n is a, c, g, or t
  misc_feature (1081)..(1081): n is a, c, g, or t
  misc_feature (1094)..(1094): n is a, c, g, or t
  misc_feature (1097)..(1097): n is a, c, g, or t
  misc_feature (1113)..(1113): n is a, c, g, or t
  misc_feature (1125)..(1125): n is a, c, g, or t
  misc_feature (1130)..(1130): n is a, c, g, or t
  misc_feature (1132)..(1133): n is a, c, g, or t
  misc_feature (1148)..(1148): n is a, c, g, or t
  misc_feature (1150)..(1150): n is a, c, g, or t
  misc_feature (1153)..(1153): n is a, c, g, or t
  misc_feature (1155)..(1156): n is a, c, g, or t
  misc_feature (1160)..(1160): n is a, c, g, or t
  misc_feature (1169)..(1169): n is a, c, g, or t
  misc_feature (1179)..(1179): n is a, c, g, or t
  misc_feature (1203)..(1203): n is a, c, g, or t
  misc_feature (1209)..(1209): n is a, c, g, or t
  misc_feature (1213)..(1213): n is a, c, g, or t
  misc_feature (1215)..(1215): n is a, c, g, or t
  misc_feature (1223)..(1223): n is a, c, g, or t
  misc_feature (1229)..(1229): n is a, c, g, or t
  misc_feature (1235)..(1235): n is a, c, g, or t
  misc_feature (1240)..(1240): n is a, c, g, or t
  misc_feature (1242)..(1242): n is a, c, g, or t
  misc_feature (1245)..(1245): n is a, c, g, or t
  misc_feature (1252)..(1252): n is a, c, g, or t
  misc_feature (1257)..(1257): n is a, c, g, or t
  misc_feature (1264)..(1264): n is a, c, g, or t
  misc_feature (1267)..(1267): n is a, c, g, or t
  misc_feature (1270)..(1270): n is a, c, g, or t
  misc_feature (1274)..(1275): n is a, c, g, or t
  misc_feature (1278)..(1278): n is a, c, g, or t
  misc_feature (1287)..(1287): n is a, c, g, or t
  misc_feature (1289)..(1290): n is a, c, g, or t
  misc_feature (1297)..(1297): n is a, c, g, or t
  misc_feature (1323)..(1323): n is a, c, g, or t
  misc_feature (1344)..(1344): n is a, c, g, or t
  misc_feature (1347)..(1347): n is a, c, g, or t
  misc_feature (1349)..(1350): n is a, c, g, or t
  misc_feature (1377)..(1378): n is a, c, g, or t
  misc_feature (1384)..(1384): n is a, c, g, or t
  misc_feature (1390)..(1390): n is a, c, g, or t
tagaggaaattactatggagaggatcgcatcaccattcaccatcacggatcctatttaggtgacactatagaatcgtcgacccacgcgtccgaaaagatggttgctgcctccatcaaagatggagaggctgtgtggtttggctgtgatgttggaaaacacttcaatagcaagctgggcctcagtgacatgaatctctatgaccatgagttagtgtttggtgtctccttgaagaacatgaataaagcggagaggctgacttttggtgagtcacttatgacccacgccatgaccttcactgctgtctcagagaaggatgatcaggatggtgctttcacaaaatggagagtggagaattcatggggtgaagaccatggccacaaaggttacctgtgcatgacagatgagtggttctctgagtatgtctacgaagtggtggtggacaggaagcatgtccctgaagaggtgctagctgtgttagagcaggaacccattgtcctgccagcatgggaccccatgggagctttggctgagtgatactgccctccagctctttcctccttccatggaacctgacgtagctgcaaaggacagatccagggactgaagccaaagttatgcaagggactgtgtgttgccacaggacacagtcagatttccagtctccaccaggaacctcttcagaaagtgtgctttatgctgaaacagaatactgttaaaggaaaaaaaagaggggggaagatcaggtcatactatctactctcctcatctctaacagctcaggatctcttagcatttttaattagatgtaattgtttgtcttttaactgtcaaaaagtttggnttctgtgtctgtgttttaataanacnaanaggacnancgattgaaggtgtatggaanaaaaaacaaacctaatgctcccttgttcctaaantaaaaanggaaggganggtngncntaaaaattaacctctcgaaactgcctgctgctgganantaancntnntcctttcctaaatggcnantcnntgaaatcccnntttttttcaagggaaatttnttgggccncctaanaaccccaanaaatggaaggttnaancaaaactgacatgaantccttcccgttncgaancnngggggggcccctccncngcntnnaacncaggtttgnaaaaagcctnaaaaaaatttggggaaaaaaaccnaaaacnttancngggccccnccaaanctttanggggnanccnccccaanggttnattttcnccnttnaaannggnattgggggncnnaaaaaanaaaacccctttttttctaaaaaaaangggcccaaaatttttaaaaanttncnnaaaaaaaaaaaaaaagggggccccccnnaagggnctaaanttttt

SEQ ID NO: 382 - DNA, 256 bp, Homo Sapiens
  misc_feature (3)..(3): n is a, c, g, or t
  misc_feature (19)..(19): n is a, c, g, or t
  misc_feature (21)..(21): n is a, c, g, or t
  misc_feature (41)..(41): n is a, c, g, or t
ttntttaagaggagaaatnantctgagaggatcgcataccntacctacggatcctatttaggtgacactatagaatcgtcgacccacgcgtccgcgggagccgcagctatggagccgcaggaggagagagaaacgcaggttgctgcgtggttaaaaaaaatatttggagatcatcctattccacagtatgaggtgaacccacggaccacagagattttacatcacctttcagaacgcaacagggtccgggacaggg

SEQ ID NO: 383 - DNA, 1468 bp, Homo Sapiens
  misc_feature (4)..(4): n is a, c, g, or t
  misc_feature (19)..(19): n is a, c, g, or t
  misc_feature (80)..(80): n is a, c, g, or t
  misc_feature (94)..(94): n is a, c, g, or t
  misc_feature (884)..(884): n is a, c, g, or t
  misc_feature (935)..(935): n is a, c, g, or t
  misc_feature (978)..(978): n is a, c, g, or t
  misc_feature (994)..(994): n is a, c, g, or t
  misc_feature (996)..(996): n is a, c, g, or t
  misc_feature (1006)..(1006): n is a, c, g, or t
  misc_feature (1008)..(1008): n is a, c, g, or t
  misc_feature (1018)..(1018): n is a, c, g, or t
  misc_feature (1037)..(1037): n is a, c, g, or t
  misc_feature (1057)..(1057): n is a, c, g, or t
  misc_feature (1060)..(1060): n is a, c, g, or t
  misc_feature (1096)..(1096): n is a, c, g, or t
  misc_feature (1105)..(1105): n is a, c, g, or t
  misc_feature (1108)..(1108): n is a, c, g, or t
  misc_feature (1115)..(1115): n is a, c, g, or t
  misc_feature (1123)..(1123): n is a, c, g, or t
  misc_feature (1126)..(1127): n is a, c, g, or t
  misc_feature (1130)..(1130): n is a, c, g, or t
  misc_feature (1145)..(1145): n is a, c, g, or t
  misc_feature (1147)..(1147): n is a, c, g, or t
  misc_feature (1150)..(1151): n is a, c, g, or t
  misc_feature (1155)..(1155): n is a, c, g, or t
  misc_feature (1162)..(1162): n is a, c, g, or t
  misc_feature (1178)..(1178): n is a, c, g, or t
  misc_feature (1181)..(1181): n is a, c, g, or t
  misc_feature (1187)..(1187): n is a, c, g, or t
  misc_feature (1190)..(1190): n is a, c, g, or t
  misc_feature (1195)..(1195): n is a, c, g, or t
  misc_feature (1201)..(1202): n is a, c, g, or t
  misc_feature (1205)..(1205): n is a, c, g, or t
  misc_feature (1214)..(1214): n is a, c, g, or t
  misc_feature (1216)..(1216): n is a, c, g, or t
  misc_feature (1223)..(1223): n is a, c, g, or t
  misc_feature (1232)..(1232): n is a, c, g, or t
  misc_feature (1237)..(1237): n is a, c, g, or t
  misc_feature (1239)..(1239): n is a, c, g, or t
  misc_feature (1249)..(1249): n is a, c, g, or t
  misc_feature (1253)..(1253): n is a, c, g, or t
  misc_feature (1263)..(1263): n is a, c, g, or t
  misc_feature (1268)..(1269): n is a, c, g, or t
  misc_feature (1286)..(1286): n is a, c, g, or t
  misc_feature (1290)..(1290): n is a, c, g, or t
  misc_feature (1293)..(1293): n is a, c, g, or t
  misc_feature (1295)..(1295): n is a, c, g, or t
  misc_feature (1298)..(1298): n is a, c, g, or t
  misc_feature (1301)..(1301): n is a, c, g, or t
  misc_feature (1326)..(1326): n is a, c, g, or t
  misc_feature (1331)..(1331): n is a, c, g, or t
  misc_feature (1336)..(1336): n is a, c, g, or t
  misc_feature (1338)..(1338): n is a, c, g, or t
  misc_feature (1342)..(1342): n is a, c, g, or t
  misc_feature (1356)..(1357): n is a, c, g, or t
  misc_feature (1365)..(1365): n is a, c, g, or t
  misc_feature (1367)..(1367): n is a, c, g, or t
  misc_feature (1369)..(1370): n is a, c, g, or t
  misc_feature (1380)..(1380): n is a, c, g, or t
  misc_feature (1382)..(1382): n is a, c, g, or t
  misc_feature (1386)..(1386): n is a, c, g, or t
  misc_feature (1394)..(1394): n is a, c, g, or t
  misc_feature (1399)..(1399): n is a, c, g, or t
  misc_feature (1404)..(1404): n is a, c, g, or t
  misc_feature (1406)..(1406): n is a, c, g, or t
  misc_feature (1415)..(1417): n is a, c, g, or t
  misc_feature (1428)..(1429): n is a, c, g, or t
  misc_feature (1433)..(1433): n is a, c, g, or t
  misc_feature (1444)..(1444): n is a, c, g, or t
  misc_feature (1447)..(1448): n is a, c, g, or t
  misc_feature (1450)..(1450): n is a, c, g, or t
  misc_feature (1454)..(1456): n is a, c, g, or t
  misc_feature (1458)..(1459): n is a, c, g, or t
  misc_feature (1461)..(1462): n is a, c, g, or t
  misc_feature (1466)..(1466): n is a, c, g, or t
  misc_feature (1468)..(1468): n is a, c, g, or t
gatngaggaaaattactangagagggatgcatcaccatcaccatcacggatcctattttagggtgacactatagaatcgntcgacccacgccgntccgagaccggccggggaagacattgccaatctagctgatgaattcaaggatcacttggtgcctgaccctggctgccattatgaccaactaattgaaattaacctcagtgagctgaagccacacatcaatgggcccttcacccctgacctggctcaccctgtggcagaagtgggcaaggtggcagagaaggaaggatggcctctggacatccgagtgggtctaattggtagctgcaccaattcaagctatgaagatatggggcgctcagcagctgtggccaagcaggcactggcccatggcctcaagtgcaagtcccagttcaccatcactccaggttccgagcagatccgcgccaccattgagcgggacggctatgcacagatcttgagggatctgggtggcattgtcctggccaatgcttgtggcccctgcattggccagtgggacaggaaggacatcaagaagggggagaagaacacaatcgtcacctcctacaacaggaacttcacgggccgcaacgacgcaaaccccgagacccatgcctttgtcacgtccccagagattgtcacagccctggccattgcgggaaccctcaagttcaacccagagaccgactacctgacgggcacggatggcaagaagttcaggctggaggctccggatgcagatgagcttcccaaaggggagtttgacccagggcaggacacctaccagcacccacccaaggacagcagcgggcagcatgtggacgtgagccccaccagccagcgcctgcagctcctggagccnttttgacaagtgggatggcaaggacctggaggacctgcaaatcctcatcanggtcaaagggaagtgtaccactgaccacatctcagctgctggncccctggctcagttcngngggcctttgnanaacatctccnacaaacctggctcattggngcccatcaacattgaaaaanggnaaggccaactccgtgggcaatgccgtccctcagaantttggcccngtncctgaanctggcccnctnntanaaaaaaaattggcancnggnngggnggggatnggaaaaaaaaaattanggngaaggntcnaaccnggaacnngcnctcttgaancnccccccnttgggggcnggccntntccccaaaantttnccggatcccnaaacnncctgaaaaaaggggcgntttnttnanctnttnaccggggaaaaaaaaattcccgggnaaaantaacntngggnggaaaatccccggnnccctgggntntnnacccccggancnaaancccctaanccttnaaaanantggtccccnnnccccaaaaaannaaangggcccccccnggnntncccnnnannanncccntn

SEQ ID NO: 384 - DNA, 1584 bp, Homo Sapiens
  misc_feature (2)..(2): n is a, c, g, or t
  misc_feature (5)..(5): n is a, c, g, or t
  misc_feature (9)..(9): n is a, c, g, or t
  misc_feature (41)..(41): n is a, c, g, or t
  misc_feature (45)..(45): n is a, c, g, or t
  misc_feature (49)..(49): n is a, c, g, or t
  misc_feature (57)..(57): n is a, c, g, or t
  misc_feature (68)..(68): n is a, c, g, or t
  misc_feature (78)..(78): n is a, c, g, or t
  misc_feature (98)..(98): n is a, c, g, or t
  misc_feature (103)..(103): n is a, c, g, or t
  misc_feature (106)..(108): n is a, c, g, or t
  misc_feature (122)..(122): n is a, c, g, or t
  misc_feature (128)..(128): n is a, c, g, or t
  misc_feature (135)..(135): n is a, c, g, or t
  misc_feature (139)..(139): n is a, c, g, or t
  misc_feature (146)..(146): n is a, c, g, or t
  misc_feature (151)..(151): n is a, c, g, or t
  misc_feature (156)..(157): n is a, c, g, or t
  misc_feature (162)..(162): n is a, c, g, or t
  misc_feature (165)..(165): n is a, c, g, or t
  misc_feature (170)..(170): n is a, c, g, or t
  misc_feature (186)..(186): n is a, c, g, or t
  misc_feature (193)..(193): n is a, c, g, or t
  misc_feature (196)..(196): n is a, c, g, or t
  misc_feature (206)..(206): n is a, c, g, or t
  misc_feature (219)..(219): n is a, c, g, or t
  misc_feature (224)..(224): n is a, c, g, or t
  misc_feature (228)..(229): n is a, c, g, or t
  misc_feature (233)..(233): n is a, c, g, or t
  misc_feature (243)..(243): n is a, c, g, or t
  misc_feature (246)..(250): n is a, c, g, or t
  misc_feature (254)..(254): n is a, c, g, or t
  misc_feature (256)..(256): n is a, c, g, or t
  misc_feature (268)..(268): n is a, c, g, or t
  misc_feature (270)..(270): n is a, c, g, or t
  misc_feature (274)..(274): n is a, c, g, or t
  misc_feature (283)..(283): n is a, c, g, or t
  misc_feature (293)..(293): n is a, c, g, or t
  misc_feature (297)..(297): n is a, c, g, or t
  misc_feature (299)..(300): n is a, c, g, or t
  misc_feature (309)..(309): n is a, c, g, or t
  misc_feature (311)..(312): n is a, c, g, or t
  misc_feature (325)..(327): n is a, c, g, or t
  misc_feature (330)..(330): n is a, c, g, or t
  misc_feature (342)..(342): n is a, c, g, or t
  misc_feature (349)..(349): n is a, c, g, or t
  misc_feature (353)..(354): n is a, c, g, or t
  misc_feature (361)..(363): n is a, c, g, or t
  misc_feature (366)..(368): n is a, c, g, or t
  misc_feature (376)..(376): n is a, c, g, or t
  misc_feature (381)..(382): n is a, c, g, or t
  misc_feature (397)..(397): n is a, c, g, or t
  misc_feature (401)..(401): n is a, c, g, or t
  misc_feature (403)..(403): n is a, c, g, or t
  misc_feature (406)..(406): n is a, c, g, or t
  misc_feature (410)..(410): n is a, c, g, or t
  misc_feature (414)..(414): n is a, c, g, or t
  misc_feature (421)..(421): n is a, c, g, or t
  misc_feature (424)..(424): n is a, c, g, or t
  misc_feature (426)..(426): n is a, c, g, or t
  misc_feature (428)..(428): n is a, c, g, or t
  misc_feature (435)..(436): n is a, c, g, or t
  misc_feature (438)..(438): n is a, c, g, or t
  misc_feature (440)..(440): n is a, c, g, or t
  misc_feature (442)..(443): n is a, c, g, or t
  misc_feature (445)..(445): n is a, c, g, or t
  misc_feature (447)..(448): n is a, c, g, or t
  misc_feature (451)..(451): n is a, c, g, or t
  misc_feature (453)..(454): n is a, c, g, or t
  misc_feature (458)..(458): n is a, c, g, or t
  misc_feature (467)..(467): n is a, c, g, or t
  misc_feature (473)..(473): n is a, c, g, or t
  misc_feature (476)..(476): n is a, c, g, or t
  misc_feature (479)..(479): n is a, c, g, or t
  misc_feature (483)..(483): n is a, c, g, or t
  misc_feature (487)..(488): n is a, c, g, or t
  misc_feature (492)..(492): n is a, c, g, or t
  misc_feature (496)..(498): n is a, c, g, or t
  misc_feature (503)..(503): n is a, c, g, or t
  misc_feature (505)..(508): n is a, c, g, or t
  misc_feature (511)..(512): n is a, c, g, or t
  misc_feature (515)..(515): n is a, c, g, or t
  misc_feature (517)..(517): n is a, c, g, or t
  misc_feature (521)..(521): n is a, c, g, or t
  misc_feature (524)..(525): n is a, c, g, or t
  misc_feature (528)..(529): n is a, c, g, or t
  misc_feature (531)..(531): n is a, c, g, or t
  misc_feature (534)..(534): n is a, c, g, or t
  misc_feature (539)..(539): n is a, c, g, or t
  misc_feature (544)..(544): n is a, c, g, or t
  misc_feature (546)..(546): n is a, c, g, or t
  misc_feature (550)..(550): n is a, c, g, or t
  misc_feature (557)..(557): n is a, c, g, or t
  misc_feature (572)..(572): n is a, c, g, or t
  misc_feature (574)..(574): n is a, c, g, or t
  misc_feature (580)..(580): n is a, c, g, or t
  misc_feature (588)..(589): n is a, c, g, or t
  misc_feature (592)..(593): n is a, c, g, or t
  misc_feature (611)..(611): n is a, c, g, or t
  misc_feature (613)..(614): n is a, c, g, or t
  misc_feature (616)..(616): n is a, c, g, or t
  misc_feature (620)..(620): n is a, c, g, or t
  misc_feature (623)..(623): n is a, c, g, or t
  misc_feature (627)..(627): n is a, c, g, or t
  misc_feature (629)..(629): n is a, c, g, or t
  misc_feature (632)..(633): n is a, c, g, or t
  misc_feature (636)..(641): n is a, c, g, or t
  misc_feature (643)..(643): n is a, c, g, or t
  misc_feature (648)..(648): n is a, c, g, or t
  misc_feature (651)..(654): n is a, c, g, or t
  misc_feature (658)..(658): n is a, c, g, or t
  misc_feature (661)..(661): n is a, c, g, or t
  misc_feature (664)..(664): n is a, c, g, or t
  misc_feature (669)..(670): n is a, c, g, or t
  misc_feature (675)..(675): n is a, c, g, or t
  misc_feature (677)..(677): n is a, c, g, or t
  misc_feature (679)..(679): n is a, c, g, or t
  misc_feature (681)..(681): n is a, c, g, or t
  misc_feature (686)..(690): n is a, c, g, or t
  misc_feature (695)..(695): n is a, c, g, or t
  misc_feature (697)..(697): n is a, c, g, or t
  misc_feature (700)..(702): n is a, c, g, or t
  misc_feature (704)..(705): n is a, c, g, or t
  misc_feature (710)..(710): n is a, c, g, or t
  misc_feature (718)..(718): n is a, c, g, or t
  misc_feature (720)..(720): n is a, c, g, or t
  misc_feature (722)..(724): n is a, c, g, or t
  misc_feature (730)..(731): n is a, c, g, or t
  misc_feature (736)..(738): n is a, c, g, or t
  misc_feature (740)..(740): n is a, c, g, or t
  misc_feature (744)..(744): n is a, c, g, or t
  misc_feature (748)..(748): n is a, c, g, or t
  misc_feature (752)..(752): n is a, c, g, or t
  misc_feature (754)..(754): n is a, c, g, or t
  misc_feature (758)..(762): n is a, c, g, or t
  misc_feature (764)..(764): n is a, c, g, or t
  misc_feature (766)..(766): n is a, c, g, or t
  misc_feature (771)..(771): n is a, c, g, or t
  misc_feature (774)..(774): n is a, c, g, or t
  misc_feature (776)..(776): n is a, c, g, or t
  misc_feature (782)..(782): n is a, c, g, or t
  misc_feature (785)..(785): n is a, c, g, or t
  misc_feature (788)..(789): n is a, c, g, or t
  misc_feature (792)..(792): n is a, c, g, or t
  misc_feature (794)..(796): n is a, c, g, or t
  misc_feature (799)..(799): n is a, c, g, or t
  misc_feature (802)..(803): n is a, c, g, or t
  misc_feature (807)..(808): n is a, c, g, or t
  misc_feature (810)..(811): n is a, c, g, or t
  misc_feature (813)..(814): n is a, c, g, or t
  misc_feature (817)..(817): n is a, c, g, or t
  misc_feature (819)..(820): n is a, c, g, or t
  misc_feature (832)..(832): n is a, c, g, or t
  misc_feature (834)..(834): n is a, c, g, or t
  misc_feature (838)..(839): n is a, c, g, or t
  misc_feature (844)..(845): n is a, c, g, or t
  misc_feature (847)..(847): n is a, c, g, or t
  misc_feature (849)..(849): n is a, c, g, or t
  misc_feature (852)..(857): n is a, c, g, or t
  misc_feature (859)..(859): n is a, c, g, or t
  misc_feature (864)..(865): n is a, c, g, or t
  misc_feature (868)..(868): n is a, c, g, or t
  misc_feature (872)..(872): n is a, c, g, or t
  misc_feature (875)..(875): n is a, c, g, or t
  misc_feature (878)..(878): n is a, c, g, or t
  misc_feature (880)..(880): n is a, c, g, or t
  misc_feature (882)..(882): n is a, c, g, or t
  misc_feature (885)..(885): n is a, c, g, or t
  misc_feature (889)..(889): n is a, c, g, or t
  misc_feature (891)..(891): n is a, c, g, or t
  misc_feature (893)..(893): n is a, c, g, or t
  misc_feature (898)..(898): n is a, c, g, or t
  misc_feature (904)..(904): n is a, c, g, or t
  misc_feature (909)..(910): n is a, c, g, or t
  misc_feature (917)..(920): n is a, c, g, or t
  misc_feature (925)..(925): n is a, c, g, or t
  misc_feature (928)..(928): n is a, c, g, or t
  misc_feature (933)..(933): n is a, c, g, or t
  misc_feature (936)..(936): n is a, c, g, or t
  misc_feature (940)..(941): n is a, c, g, or t
  misc_feature (947)..(947): n is a, c, g, or t
  misc_feature (950)..(952): n is a, c, g, or t
  misc_feature (954)..(954): n is a, c, g, or t
  misc_feature (957)..(957): n is a, c, g, or t
  misc_feature (963)..(965): n is a, c, g, or t
  misc_feature (967)..(968): n is a, c, g, or t
  misc_feature (976)..(977): n is a, c, g, or t
  misc_feature (980)..(980): n is a, c, g, or t
  misc_feature (984)..(987): n is a, c, g, or t
  misc_feature (989)..(989): n is a, c, g, or t
  misc_feature (994)..(994): n is a, c, g, or t
  misc_feature (998)..(999): n is a, c, g, or t
  misc_feature (1001)..(1001): n is a, c, g, or t
  misc_feature (1005)..(1005): n is a, c, g, or t
  misc_feature (1008)..(1008): n is a, c, g, or t
  misc_feature (1015)..(1016): n is a, c, g, or t
  misc_feature (1019)..(1019): n is a, c, g, or t
  misc_feature (1022)..(1022): n is a, c, g, or t
  misc_feature (1026)..(1027): n is a, c, g, or t
  misc_feature (1029)..(1029): n is a, c, g, or t
  misc_feature (1032)..(1034): n is a, c, g, or t
  misc_feature (1036)..(1036): n is a, c, g, or t
  misc_feature (1038)..(1038): n is a, c, g, or t
  misc_feature (1046)..(1046): n is a, c, g, or t
  misc_feature (1048)..(1048): n is a, c, g, or t
  misc_feature (1050)..(1050): n is a, c, g, or t
  misc_feature (1054)..(1057): n is a, c, g, or t
  misc_feature (1061)..(1061): n is a, c, g, or t
  misc_feature (1063)..(1063): n is a, c, g, or t
  misc_feature (1067)..(1067): n is a, c, g, or t
  misc_feature (1070)..(1075): n is a, c, g, or t
  misc_feature (1077)..(1077): n is a, c, g, or t
  misc_feature (1079)..(1079): n is a, c, g, or t
  misc_feature (1081)..(1082): n is a, c, g, or t
  misc_feature (1086)..(1086): n is a, c, g, or t
  misc_feature (1088)..(1095): n is a, c, g, or t
  misc_feature (1097)..(1097): n is a, c, g, or t
  misc_feature (1103)..(1104): n is a, c, g, or t
  misc_feature (1106)..(1106): n is a, c, g, or t
  misc_feature (1108)..(1108): n is a, c, g, or t
  misc_feature (1110)..(1112): n is a, c, g, or t
  misc_feature (1114)..(1114): n is a, c, g, or t
  misc_feature (1117)..(1117): n is a, c, g, or t
  misc_feature (1121)..(1121): n is a, c, g, or t
  misc_feature (1124)..(1124): n is a, c, g, or t
  misc_feature (1128)..(1128): n is a, c, g, or t
  misc_feature (1133)..(1134): n is a, c, g, or t
  misc_feature (1136)..(1137): n is a, c, g, or t
  misc_feature (1139)..(1139): n is a, c, g, or t
  misc_feature (1141)..(1142): n is a, c, g, or t
  misc_feature (1144)..(1144): n is a, c, g, or t
  misc_feature (1147)..(1148): n is a, c, g, or t
  misc_feature (1150)..(1151): n is a, c, g, or t
  misc_feature (1153)..(1154): n is a, c, g, or t
  misc_feature (1162)..(1163): n is a, c, g, or t
  misc_feature (1179)..(1179): n is a, c, g, or t
  misc_feature (1181)..(1182): n is a, c, g, or t
  misc_feature (1186)..(1186): n is a, c, g, or t
  misc_feature (1190)..(1191): n is a, c, g, or t
  misc_feature (1194)..(1195): n is a, c, g, or t
  misc_feature (1198)..(1199): n is a, c, g, or t
  misc_feature (1204)..(1204): n is a, c, g, or t
  misc_feature (1208)..(1209): n is a, c, g, or t
  misc_feature (1212)..(1212): n is a, c, g, or t
  misc_feature (1215)..(1215): n is a, c, g, or t
  misc_feature (1219)..(1219): n is a, c, g, or t
  misc_feature (1221)..(1223): n is a, c, g, or t
  misc_feature (1231)..(1231): n is a, c, g, or t
  misc_feature (1233)..(1233): n is a, c, g, or t
  misc_feature (1237)..(1237): n is a, c, g, or t
  misc_feature (1239)..(1240): n is a, c, g, or t
  misc_feature (1242)..(1242): n is a, c, g, or t
  misc_feature (1246)..(1247): n is a, c, g, or t
  misc_feature (1264)..(1264): n is a, c, g, or t
  misc_feature (1266)..(1267): n is a, c, g, or t
  misc_feature (1269)..(1269): n is a, c, g, or t
  misc_feature (1273)..(1274): n is a, c, g, or t
  misc_feature (1277)..(1277): n is a, c, g, or t
  misc_feature (1285)..(1286): n is a, c, g, or t
  misc_feature (1289)..(1289): n is a, c, g, or t
  misc_feature (1294)..(1294): n is a, c, g, or t
  misc_feature (1301)..(1301): n is a, c, g, or t
  misc_feature (1312)..(1312): n is a, c, g, or t
  misc_feature (1317)..(1317): n is a, c, g, or t
  misc_feature (1321)..(1321): n is a, c, g, or t
  misc_feature (1323)..(1323): n is a, c, g, or t
  misc_feature (1328)..(1329): n is a, c, g, or t
  misc_feature (1331)..(1331): n is a, c, g, or t
  misc_feature (1335)..(1335): n is a, c, g, or t
  misc_feature (1337)..(1338): n is a, c, g, or t
  misc_feature (1340)..(1340): n is a, c, g, or t
  misc_feature (1348)..(1349): n is a, c, g, or t
  misc_feature (1352)..(1352): n is a, c, g, or t
  misc_feature (1356)..(1357): n is a, c, g, or t
  misc_feature (1359)..(1359): n is a, c, g, or t
  misc_feature (1364)..(1367): n is a, c, g, or t
  misc_feature (1380)..(1380): n is a, c, g, or t
  misc_feature (1389)..(1389): n is a, c, g, or t
  misc_feature (1391)..(1393): n is a, c, g, or t
  misc_feature (1395)..(1396): n is a, c, g, or t
  misc_feature (1404)..(1404): n is a, c, g, or t
  misc_feature (1406)..(1406): n is a, c, g, or t
  misc_feature (1408)..(1408): n is a, c, g, or t
  misc_feature (1413)..(1413): n is a, c, g, or t
  misc_feature (1417)..(1418): n is a, c, g, or t
  misc_feature (1424)..(1425): n is a, c, g, or t
  misc_feature (1430)..(1430): n is a, c, g, or t
  misc_feature (1432)..(1432): n is a, c, g, or t
  misc_feature (1437)..(1437): n is a, c, g, or t
  misc_feature (1439)..(1440): n is a, c, g, or t
  misc_feature (1442)..(1442): n is a, c, g, or t
  misc_feature (1450)..(1451): n is a, c, g, or t
  misc_feature (1461)..(1461): n is a, c, g, or t
  misc_feature (1465)..(1465): n is a, c, g, or t
  misc_feature (1468)..(1468): n is a, c, g, or t
  misc_feature (1474)..(1474): n is a, c, g, or t
  misc_feature (1482)..(1482): n is a, c, g, or t
  misc_feature (1484)..(1484): n is a, c, g, or t
  misc_feature (1488)..(1489): n is a, c, g, or t
  misc_feature (1492)..(1493): n is a, c, g, or t
  misc_feature (1495)..(1495): n is a, c, g, or t
  misc_feature (1497)..(1497): n is a, c, g, or t
  misc_feature (1499)..(1499): n is a, c, g, or t
  misc_feature (1505)..(1505): n is a, c, g, or t
  misc_feature (1507)..(1507): n is a, c, g, or t
  misc_feature (1518)..(1518): n is a, c, g, or t
  misc_feature (1527)..(1527): n is a, c, g, or t
  misc_feature (1533)..(1533): n is a, c, g, or t
  misc_feature (1539)..(1540): n is a, c, g, or t
  misc_feature (1542)..(1542): n is a, c, g, or t
  misc_feature (1544)..(1544): n is a, c, g, or t
  misc_feature (1546)..(1546): n is a, c, g, or t
  misc_feature (1550)..(1550): n is a, c, g, or t
  misc_feature (1553)..(1553): n is a, c, g, or t
  misc_feature (1561)..(1562): n is a, c, g, or t
  misc_feature (1566)..(1566): n is a, c, g, or t
  misc_feature (1570)..(1570): n is a, c, g, or t
  misc_feature (1573)..(1574): n is a, c, g, or t
  misc_feature (1578)..(1578): n is a, c, g, or t
  misc_feature (1581)..(1581): n is a, c, g, or t
  misc_feature (1583)..(1584): n is a, c, g, or t
cngantagngagattactatgagaggatcgcatcccactcnccantcanggatcctntttaggtgacnctatagaatngtcgacccacgcgatccggncgcgnggnnnggcggagcgggtcncggcanccaccgnggcntagctcnggctncttcnngtccngancatgnggagggcggcccaggnggctcgngantcggagaggnggcccaagcgggnaccgnaganngagngcgagggggngcnnnnnccgnancggtgtttccgngntgcnactgttgangtcagtccgnccancnngactctgcncnngagcccggccacnnnagnatccaaaactgngagtcgngagnntttgacnnngtnnnatgagtcngcaannatgtctcctgccccnaagngnaancccnaggncactgcntanantnaacgtgnncngntnngncnngancnnctgngtctcaatngttggntanccnacgngttnnaaanctcnnncccancnnnncanntantntatnttnnttnncntantttangtacncnaccnacccccntcgtatatccaccanantttgantaatttannaanngaaactattagctcctcntnngntaanatncccntngtnntcnnnnnnancttcntgnnnntttnttntcnctatnnaattntntntncaaannnnncaaancntannnannagttngacatgcncnannnctgtcnnttccnnntntccnctanatantntcannnnngnancaacnatntntcttcnaanggnnttnannnatntannatcnncnntnnctncnnccctataaatcnanaatnnaaatnntncnacnnnnnnanatacnnacnttcnatnccnantnatncccncncncaatntcatanaaacnntaataannnnaattntcnaatcncanaccnnaacacntcnnnantanttttcnnnannccaaacannttntccnnnntntcttnttanntncgcnttncatctcnnatntancctnntncannntntntaataatncntntaannnnatcntnactnttnnnnnntntnanntcanannnnnnnncntcctcnncntncnnnantcnatangancacngactnntnncntnncntcnntnncnncctcctannatacattaatttatantnncctnattnntcnntanncatcngtcnnctnctntcantnnntaaaactnantttncnntnctcnnacaagacacttccagtnanntntctnntcntaccgcannctnttttntctcatntatatgtatcnccttngtancncattnnantttntnntnttatatannatnttcnntnttacnnnnatcatttcttatnctctatctntnnntnntcttcacntncntcatncccnnttctanntcgcnantattncnnantccataanncctctccctntctnaanataatnctatatantntaanntcnnantntnccaccncnatttcctcctncattcatantccctntatccnntnantncctnatncccaactnntctntctnatnncctnctngnn

SEQ ID NO: 385 - DNA, 256 bp, Homo Sapiens
ggacgcgtgggcgccggtgcagcgggggggcccgggggccctggtggccctgggatggggaaccgcggtggcttccgcggaggtttcggcagtggcatccggggccggggtcgcggccgtggacggggccggggccgaggccgcggagctcgcggaggcaaggccgaggataaggagtggatgcccgtcaccaagttgggccgcttggtcaaggacatgaagatcaagtccctggaggagatctatctcttctccc

SEQ ID NO: 386 - DNA, 256 bp, Homo Sapiens
aaaaacagaaaaaaccggtgtggtctggggtgcggagcgtcccagctgggcctcctgccccggcttggtgtctcagggtgcatgcttggggttgtggaggagccccctcccccacagcagagtccagcgtggagttaaccttcagtttctttgcagcgattttggccgccctggcgggagggggctgttccatcatgtgggagaggaagggccggggagcctagggggtggcgggtgagggtggacgtctcccccg

SEQ ID NO: 387 - DNA, 256 bp, Homo Sapiens
  misc_feature (5)..(5): n is a, c, g, or t
  misc_feature (120)..(120): n is a, c, g, or t
  misc_feature (128)..(128): n is a, c, g, or t
  misc_feature (136)..(136): n is a, c, g, or t
  misc_feature (155)..(155): n is a, c, g, or t
  misc_feature (242)..(242): n is a, c, g, or t
  misc_feature (246)..(246): n is a, c, g, or t
  misc_feature (252)..(252): n is a, c, g, or t
  misc_feature (255)..(255): n is a, c, g, or t
agagnaattactatgagaggatcgcatcaccatcaccatcacggatcctatttaggtgacactatagaatcgtcgacccacgcgtccgagccctttgagtgcctggaatgtgtcaaagcntttacgtnttcctccngtcttaatatgtcacatgnggacccacagcgccaaaaaaccattcacgtgattggaatgctccaaagcctttaagtttcccacgtgtgttatccttcacatgcggntccncactgncana

SEQ ID NO: 388 - DNA, 256 bp, Homo Sapiens
  misc_feature (1)..(1): n is a, c, g, or t
naactatgagaggatcgcatcaccatcaccatcacggatcctatttaggtgacactatagaatcgtcgacccacgcgtccgattttagaaaaccaggagagaagaccttcacccaacgaagccgtctttttgtgggaaatcttcctcccgacatcactgaggaagaaatgaggaaactatttgagaaatatggaaaggcaggcgaagtcttcattcataaggataaaggatttggctttatccgcttggaaacccg

SEQ ID NO: 389 - DNA, 256 bp, Homo Sapiens
  misc_feature (9)..(11): n is a, c, g, or t
  misc_feature (19)..(19): n is a, c, g, or t
  misc_feature (21)..(21): n is a, c, g, or t
  misc_feature (25)..(26): n is a, c, g, or t
ttcaaaatnnntttaattncnattnnttaaacagagaaattaactatgagaggatcgcatcaccatcaccatcacggatcctatttaggtgacactatagaatcgtcgacccacgcgtccgtgaggaggatgtgggccacgcaggggctggcggtggcgctggctctgagcgtgctgccgggcagccgggcgctgcggccgggcgactgcgaagtttgtatttcttatctgggaagattttaccaggacctcaaag

SEQ ID NO: 390 - DNA, 1200 bp, Homo Sapiens
  misc_feature (1)..(1): n is a, c, g, or t
  misc_feature (6)..(6): n is a, c, g, or t
  misc_feature (8)..(8): n is a, c, g, or t
  misc_feature (591)..(591): n is a, c, g, or t
  misc_feature (667)..(668): n is a, c, g, or t
  misc_feature (707)..(707): n is a, c, g, or t
  misc_feature (747)..(747): n is a, c, g, or t
  misc_feature (753)..(753): n is a, c, g, or t
  misc_feature (756)..(756): n is a, c, g, or t
  misc_feature (767)..(767): n is a, c, g, or t
  misc_feature (773)..(773): n is a, c, g, or t
  misc_feature (775)..(775): n is a, c, g, or t
  misc_feature (779)..(779): n is a, c, g, or t
  misc_feature (790)..(791): n is a, c, g, or t
  misc_feature (819)..(819): n is a, c, g, or t
  misc_feature (824)..(824): n is a, c, g, or t
  misc_feature (828)..(828): n is a, c, g, or t
  misc_feature (834)..(834): n is a, c, g, or t
  misc_feature (840)..(840): n is a, c, g, or t
  misc_feature (843)..(843): n is a, c, g, or t
  misc_feature (848)..(848): n is a, c, g, or t
  misc_feature (857)..(857): n is a, c, g, or t
  misc_feature (873)..(873): n is a, c, g, or t
  misc_feature (891)..(891): n is a, c, g, or t
  misc_feature (898)..(898): n is a, c, g, or t
  misc_feature (908)..(908): n is a, c, g, or t
  misc_feature (910)..(910): n is a, c, g, or t
  misc_feature (920)..(921): n is a, c, g, or t
  misc_feature (927)..(927): n is a, c, g, or t
  misc_feature (931)..(931): n is a, c, g, or t
  misc_feature (934)..(934): n is a, c, g, or t
  misc_feature (936)..(936): n is a, c, g, or t
  misc_feature (940)..(940): n is a, c, g, or t
  misc_feature (945)..(945): n is a, c, g, or t
  misc_feature (951)..(951): n is a, c, g, or t
  misc_feature (954)..(955): n is a, c, g, or t
  misc_feature (959)..(960): n is a, c, g, or t
  misc_feature (963)..(963): n is a, c, g, or t
  misc_feature (965)..(965): n is a, c, g, or t
  misc_feature (970)..(970): n is a, c, g, or t
  misc_feature (977)..(977): n is a, c, g, or t
  misc_feature (982)..(983): n is a, c, g, or t
  misc_feature (991)..(991): n is a, c, g, or t
  misc_feature (1001)..(1001): n is a, c, g, or t
  misc_feature (1004)..(1004): n is a, c, g, or t
  misc_feature (1008)..(1008): n is a, c, g, or t
  misc_feature (1011)..(1011): n is a, c, g, or t
  misc_feature (1016)..(1016): n is a, c, g, or t
  misc_feature (1023)..(1024): n is a, c, g, or t
  misc_feature (1026)..(1027): n is a, c, g, or t
  misc_feature (1034)..(1034): n is a, c, g, or t
  misc_feature (1040)..(1040): n is a, c, g, or t
  misc_feature (1050)..(1050): n is a, c, g, or t
  misc_feature (1052)..(1052): n is a, c, g, or t
  misc_feature (1054)..(1054): n is a, c, g, or t
  misc_feature (1058)..(1058): n is a, c, g, or t
  misc_feature (1060)..(1060): n is a, c, g, or t
  misc_feature (1066)..(1067): n is a, c, g, or t
  misc_feature (1069)..(1069): n is a, c, g, or t
  misc_feature (1078)..(1078): n is a, c, g, or t
  misc_feature (1080)..(1081): n is a, c, g, or t
  misc_feature (1089)..(1089): n is a, c, g, or t
  misc_feature (1091)..(1091): n is a, c, g, or t
  misc_feature (1101)..(1101): n is a, c, g, or t
  misc_feature (1106)..(1106): n is a, c, g, or t
  misc_feature (1108)..(1109): n is a, c, g, or t
  misc_feature (1111)..(1112): n is a, c, g, or t
  misc_feature (1115)..(1118): n is a, c, g, or t
  misc_feature (1120)..(1121): n is a, c, g, or t
  misc_feature (1124)..(1125): n is a, c, g, or t
  misc_feature (1129)..(1129): n is a, c, g, or t
  misc_feature (1137)..(1137): n is a, c, g, or t
  misc_feature (1141)..(1143): n is a, c, g, or t
  misc_feature (1150)..(1151): n is a, c, g, or t
  misc_feature (1153)..(1154): n is a, c, g, or t
  misc_feature (1157)..(1157): n is a, c, g, or t
  misc_feature (1159)..(1159): n is a, c, g, or t
  misc_feature (1163)..(1164): n is a, c, g, or t
  misc_feature (1171)..(1172): n is a, c, g, or t
  misc_feature (1175)..(1175): n is a, c, g, or t
  misc_feature (1185)..(1185): n is a, c, g, or t
  misc_feature (1191)..(1191): n is a, c, g, or t
  misc_feature (1193)..(1194): n is a, c, g, or t
  misc_feature (1198)..(1199): n is a, c, g, or t
nattananaagaaaaattaactatggagaggatcgcatcaccatcaccatcacgggatcctatttaggtgacactatagaatcgtcgacccacgcgtccgccaggcgcccgcccgccgcgcgtgattctcgcctcgccgcagcccagccctgcgcgccttgcccggcggcccccgcccggccgctccgggcccctggccccgcggagcgatgctgctgctggctgccgccttcctcgtggccttcgtgctgctgctgtacatggtgtctccgctcatcagccccaagcccctcgccctgcccggggcgcatgtggtggttacaggaggttccagtggcatcgggaagtgcattgctatcgagtgctataaacaaggagcttttataactctggttgcacgaaatgaggataagctgctgcaggcaaagaaagaaattgaaatgcactctattaatgacaaacaggtggtactttgcatatcagttgatgtatctcaagactataaccaagtagagaatgtcataaaacaagcacaggagaaactgggtccagtggacatgctggtaaattgtgcaggaatggcagtgtcangaaaatttgaaaatcttgaagttagtacctttgaaaggttaatgagcatcaattacctgggcagcgtgtaccccanncgggccgtgatcaccaccatgaaggaacgccgggtgggnagatcgtgtttgtgtcctcccaagaaggaaaattgggaantaattnagnttcaagcctantctgtntncaanttttgctatanngggattgggctaaaagcttttgccaaanggaangatnaaactnatatanatntttancatcaacanttgcattaacccaaanaaaaaaaaaaaaaccctnggttttnccaaaaaaananaaaaaaaatnnttttgnaaanttnancttntttcnaaaatnaanntttnnttngnaaaanaaaaaanggggnnccaaaaanatttttttanaantacnttnatagnaaaattnnannaattttncttttnttaaaaaaanananattnanttaganncnttaaaaatngnnaaattttntnataaattttntatantnnannggnnnnanntanngggnttaacttntgannntttttcnnannatntnattnnattatanntanaaatttaaanaaaaananntttnnc

SEQ ID NO: 391 - DNA, 1251 bp, Homo Sapiens
  misc_feature (509)..(509): n is a, c, g, or t
  misc_feature (861)..(861): n is a, c, g, or t
  misc_feature (869)..(869): n is a, c, g, or t
  misc_feature (902)..(902): n is a, c, g, or t
  misc_feature (939)..(939): n is a, c, g, or t
  misc_feature (941)..(941): n is a, c, g, or t
  misc_feature (958)..(958): n is a, c, g, or t
  misc_feature (963)..(963): n is a, c, g, or t
  misc_feature (985)..(985): n is a, c, g, or t
  misc_feature (1040)..(1040): n is a, c, g, or t
  misc_feature (1057)..(1057): n is a, c, g, or t
  misc_feature (1067)..(1067): n is a, c, g, or t
  misc_feature (1075)..(1075): n is a, c, g, or t
  misc_feature (1077)..(1077): n is a, c, g, or t
  misc_feature (1099)..(1099): n is a, c, g, or t
  misc_feature (1105)..(1105): n is a, c, g, or t
  misc_feature (1111)..(1111): n is a, c, g, or t
  misc_feature (1117)..(1117): n is a, c, g, or t
  misc_feature (1120)..(1120): n is a, c, g, or t
  misc_feature (1122)..(1122): n is a, c, g, or t
  misc_feature (1124)..(1124): n is a, c, g, or t
  misc_feature (1131)..(1133): n is a, c, g, or t
  misc_feature (1136)..(1136): n is a, c, g, or t
  misc_feature (1141)..(1141): n is a, c, g, or t
  misc_feature (1162)..(1162): n is a, c, g, or t
  misc_feature (1166)..(1166): n is a, c, g, or t
  misc_feature (1178)..(1178): n is a, c, g, or t
  misc_feature (1183)..(1183): n is a, c, g, or t
  misc_feature (1190)..(1190): n is a, c, g, or t
  misc_feature (1192)..(1193): n is a, c, g, or t
  misc_feature (1196)..(1197): n is a, c, g, or t
  misc_feature (1208)..(1208): n is a, c, g, or t
  misc_feature (1218)..(1218): n is a, c, g, or t
  misc_feature (1223)..(1223): n is a, c, g, or t
  misc_feature (1225)..(1225): n is a, c, g, or t
  misc_feature (1229)..(1229): n is a, c, g, or t
  misc_feature (1242)..(1242): n is a, c, g, or t
  misc_feature (1246)..(1246): n is a, c, g, or t
agaaattactatgagaggatcgcatcaccatcaccatcacggatcctatttaggtgacactatagaatcgtcgacccacgcgtccgtctacaccgaggtccgcgagctggtgagcctcaagcaggagcagcaggctttcaaggaggcggccgacacggagcggctcgccctgcaggccctcacggagaagcttctcaggtctgaggagtccgtctcccgcctcccggaggagatccggagactggaggaagagctccgccagctgaagtccgattcccacgggccgaaggaggacggaggcttcagacactcggaagcctttgaggcactccagcaaaagagtcagggactggactccaggctccagcacgtggaggatggggtgctctccatgcaggtggcttctgcgcgccagaccgagagcctggagtccctcctgtccaagagccaggagcacgagcagcgcctggccgccctgcaggggcgcctggaaggcctcgggtcctcanaggcagaccaggatggcctggccagcacggtgaggagcctgggcgagacccagctggtgctctacggtgacgtggaggagctgaagaggagtgtgggcgagctccccagcaccgtggaatcactccagaaggtgcaggagcaggtgcacacgctgctcagtcaggaccaagcccaggccgcccgtctgcctcctcaggacttcctggacagactttcttctctagacaacctgaaagcctcagtcagccaagtggaggcggacttgaaaatgctcaggactgctgtggacagtttggttgcatactcggtcaaaatagaaaccaacgagaacaatctggaatcagccaaggntttactanatgacctgaggaatgatctggataggttgtttngtgaaagtggaaaaaattcacgaaaaggtctaatgantngcgtgtgcagggcgcgnatttnaaagtccaattttctcatgacnaaaaatgtgtggttttttcccatgggtcccctacccccaattttcttgtcccctnttaaaaaacatttttcncccctgaaanccaaggcntntttttttcttgccccgtttaantttttnaaaaantttaanttncngncttccgnnnttngggtnggtttcctgaaacccaacccntgtnaaaaaagggggnttttnttgggtntnnttnnccaaaaaaaangaaaaggttntattngngatnaaaaaaacaaatntccncaaat

SEQ ID NO: 392 - DNA, 1299 bp, Homo Sapiens
  misc_feature (742)..(742): n is a, c, g, or t
  misc_feature (825)..(825): n is a, c, g, or t
  misc_feature (843)..(843): n is a, c, g, or t
  misc_feature (857)..(857): n is a, c, g, or t
  misc_feature (861)..(861): n is a, c, g, or t
  misc_feature (923)..(923): n is a, c, g, or t
  misc_feature (940)..(940): n is a, c, g, or t
  misc_feature (945)..(945): n is a, c, g, or t
  misc_feature (966)..(966): n is a, c, g, or t
  misc_feature (975)..(975): n is a, c, g, or t
  misc_feature (985)..(985): n is a, c, g, or t
  misc_feature (988)..(988): n is a, c, g, or t
  misc_feature (992)..(993): n is a, c, g, or t
  misc_feature (995)..(995): n is a, c, g, or t
  misc_feature (1015)..(1015): n is a, c, g, or t
  misc_feature (1021)..(1021): n is a, c, g, or t
  misc_feature (1031)..(1032): n is a, c, g, or t
  misc_feature (1034)..(1034): n is a, c, g, or t
  misc_feature (1043)..(1043): n is a, c, g, or t
  misc_feature (1046)..(1046): n is a, c, g, or t
  misc_feature (1050)..(1051): n is a, c, g, or t
  misc_feature (1054)..(1055): n is a, c, g, or t
  misc_feature (1057)..(1057): n is a, c, g, or t
  misc_feature (1066)..(1066): n is a, c, g, or t
  misc_feature (1068)..(1068): n is a, c, g, or t
  misc_feature (1079)..(1079): n is a, c, g, or t
  misc_feature (1081)..(1081): n is a, c, g, or t
  misc_feature (1090)..(1090): n is a, c, g, or t
  misc_feature (1093)..(1094): n is a, c, g, or t
  misc_feature (1096)..(1096): n is a, c, g, or t
  misc_feature (1099)..(1100): n is a, c, g, or t
  misc_feature (1111)..(1111): n is a, c, g, or t
  misc_feature (1115)..(1115): n is a, c, g, or t
  misc_feature (1119)..(1119): n is a, c, g, or t
  misc_feature (1125)..(1125): n is a, c, g, or t
  misc_feature (1129)..(1129): n is a, c, g, or t
  misc_feature (1138)..(1138): n is a, c, g, or t
  misc_feature (1145)..(1146): n is a, c, g, or t
  misc_feature (1150)..(1150): n is a, c, g, or t
  misc_feature (1156)..(1156): n is a, c, g, or t
  misc_feature (1160)..(1161): n is a, c, g, or t
  misc_feature (1164)..(1165): n is a, c, g, or t
  misc_feature (1167)..(1167): n is a, c, g, or t
  misc_feature (1178)..(1179): n is a, c, g, or t
  misc_feature (1181)..(1181): n is a, c, g, or t
  misc_feature (1184)..(1184): n is a, c, g, or t
  misc_feature (1191)..(1191): n is a, c, g, or t
  misc_feature (1194)..(1194): n is a, c, g, or t
  misc_feature (1198)..(1198): n is a, c, g, or t
  misc_feature (1203)..(1203): n is a, c, g, or t
  misc_feature (1210)..(1210): n is a, c, g, or t
  misc_feature (1216)..(1216): n is a, c, g, or t
  misc_feature (1220)..(1220): n is a, c, g, or t
  misc_feature (1226)..(1226): n is a, c, g, or t
  misc_feature (1233)..(1233): n is a, c, g, or t
  misc_feature (1239)..(1240): n is a, c, g, or t
  misc_feature (1248)..(1248): n is a, c, g, or t
  misc_feature (1255)..(1255): n is a, c, g, or t
  misc_feature (1269)..(1270): n is a, c, g, or t
  misc_feature (1275)..(1275): n is a, c, g, or t
  misc_feature (1277)..(1277): n is a, c, g, or t
  misc_feature (1284)..(1284): n is a, c, g, or t
  misc_feature (1291)..(1291): n is a, c, g, or t
  misc_feature (1298)..(1299): n is a, c, g, or t
attagagaaattactatgagaggatcgcatcaccatcaccatcacggatcctatttaggtgacactatagaatcgtcgacccacgcgtccgggccaaggggggaccgccgccaggcaacgccgccggggacacagggcagcccgcagaggacagcgaccacggtgggaagcctcccctcccagcggagaagccggctccagggcctgggctgccgcccgagcctcgcgagcagagggacgtggagcgagcgggtggaaaccaggcggccagccagctggaggctgaaattaaaaagatagtagcagaagctggcagggcggagatgctggaccacgccgtcctgcttcaggtgatcaaagaacagcaggtgcagcaaaagcgcttgctggaccagcaggagaagctgctggcggtgatcgaggagcagcacaaggagatccaccagcagaggcaggaggacgaggaggataaacccaggcaggtggaggtgcatcaagagcccggggcagcggtgcccagaggccaggaggcccctgaaggcaaggccagggagacggtggagaatctgcctcccctgcctttggaccctgtcctcagagctcctgggggccgccctgctccatcccaggaccttaaccagcgctccctggagcactctgaggggcctgtgggcagagaccctgctggccctcctgacggcggccctgacacagagcctcgggcagcccaggccaagctganagatggccagaaggatgccgcccccagggcagctggcactgtgaaggagctccccaagggcccggagcaggtgcccgtgccanaccccgccagggaagccnggggcccaaaggancgcntcgcaaaagaattcctgggcaaagtcaggacgttactggcggttccaagacaggaaaaaacntgggaaggaggtggcanccctnggcaccacattctgaaggaanccaattggnttgtgggcanggnccannanaaaaaacggggaaccctccnatgaancccaaacaanntnaccccaaanctngggnnttnnancggaacctngnccggggggggngnaaaagaaanaanntnccnnaacccccaggntttntttncccccncccngaaaattgnggggttnntttntttaangggnnaannangggtgaaaaannanggnccccccnggntggnaaccnttggggnttcccntttnaaaaanaaaaaancccccnngggggggnaaatttnttttttttttcccnnaaaananccaaaanggggggnaaaaacnn

SEQ ID NO: 393 - DNA, 256 bp, Homo Sapiens
  misc_feature (2)..(4): n is a, c, g, or t
tnnnctatgagaggatcgcatcaccatcaccatcacggatcctatttaggtgacactatagaatcgtcgacccacgcgtccgcccacgcgtccgcccacgcgtccgcaaacattaaagattcaaaagataatcaggcaaaacaaaatgtgggtaatggcagtgttcccatgcgtaccgtgggtttggaaaatcgcctgaactcctttattcaggtggatgcccctgaccaaaaaggaactgagataaaaccaggac

SEQ ID NO: 394 - DNA, 1561 bp, Homo Sapiens
  misc_feature (234)..(234): n is a, c, g, or t
  misc_feature (290)..(290): n is a, c, g, or t
  misc_feature (294)..(294): n is a, c, g, or t
  misc_feature (298)..(298): n is a, c, g, or t
  misc_feature (315)..(315): n is a, c, g, or t
  misc_feature (409)..(409): n is a, c, g, or t
  misc_feature (411)..(411): n is a, c, g, or t
  misc_feature (415)..(415): n is a, c, g, or t
  misc_feature (438)..(438): n is a, c, g, or t
  misc_feature (443)..(444): n is a, c, g, or t
  misc_feature (448)..(450): n is a, c, g, or t
  misc_feature (456)..(456): n is a, c, g, or t
  misc_feature (465)..(465): n is a, c, g, or t
  misc_feature (467)..(467): n is a, c, g, or t
  misc_feature (472)..(472): n is a, c, g, or t
  misc_feature (476)..(476): n is a, c, g, or t
  misc_feature (480)..(480): n is a, c, g, or t
  misc_feature (487)..(490): n is a, c, g, or t
  misc_feature (496)..(496): n is a, c, g, or t
  misc_feature (498)..(499): n is a, c, g, or t
  misc_feature (501)..(501): n is a, c, g, or t
  misc_feature (514)..(516): n is a, c, g, or t
  misc_feature (518)..(518): n is a, c, g, or t
  misc_feature (523)..(523): n is a, c, g, or t
  misc_feature (535)..(537): n is a, c, g, or t
  misc_feature (539)..(540): n is a, c, g, or t
  misc_feature (544)..(544): n is a, c, g, or t
  misc_feature (557)..(558): n is a, c, g, or t
  misc_feature (561)..(562): n is a, c, g, or t
  misc_feature (565)..(565): n is a, c, g, or t
  misc_feature (572)..(574): n is a, c, g, or t
  misc_feature (579)..(579): n is a, c, g, or t
  misc_feature (583)..(585): n is a, c, g, or t
  misc_feature (590)..(590): n is a, c, g, or t
  misc_feature (592)..(592): n is a, c, g, or t
  misc_feature (598)..(598): n is a, c, g, or t
  misc_feature (600)..(602): n is a, c, g, or t
  misc_feature (604)..(605): n is a, c, g, or t
  misc_feature (616)..(617): n is a, c, g, or t
  misc_feature (624)..(624): n is a, c, g, or t
  misc_feature (627)..(628): n is a, c, g, or t
  misc_feature (636)..(636): n is a, c, g, or t
  misc_feature (643)..(643): n is a, c, g, or t
  misc_feature (648)..(648): n is a, c, g, or t
  misc_feature (655)..(655): n is a, c, g, or t
  misc_feature (658)..(658): n is a, c, g, or t
  misc_feature (660)..(660): n is a, c, g, or t
  misc_feature (666)..(666): n is a, c, g, or t
  misc_feature (669)..(669): n is a, c, g, or t
  misc_feature (672)..(672): n is a, c, g, or t
  misc_feature (674)..(674): n is a, c, g, or t
  misc_feature (677)..(677): n is a, c, g, or t
  misc_feature (679)..(680): n is a, c, g, or t
  misc_feature (683)..(683): n is a, c, g, or t
  misc_feature (685)..(687): n is a, c, g, or t
  misc_feature (694)..(694): n is a, c, g, or t
  misc_feature (697)..(697): n is a, c, g, or t
  misc_feature (704)..(704): n is a, c, g, or t
  misc_feature (706)..(706): n is a, c, g, or t
  misc_feature (711)..(711): n is a, c, g, or t
  misc_feature (714)..(715): n is a, c, g, or t
  misc_feature (719)..(719): n is a, c, g, or t
  misc_feature (725)..(725): n is a, c, g, or t
  misc_feature (729)..(729): n is a, c, g, or t
  misc_feature (731)..(731): n is a, c, g, or t
  misc_feature (733)..(733): n is a, c, g, or t
  misc_feature (738)..(738): n is a, c, g, or t
  misc_feature (742)..(742): n is a, c, g, or t
  misc_feature (761)..(762): n is a, c, g, or t
  misc_feature (765)..(765): n is a, c, g, or t
  misc_feature (767)..(767): n is a, c, g, or t
  misc_feature (770)..(771): n is a, c, g, or t
  misc_feature (774)..(774): n is a, c, g, or t
  misc_feature (781)..(781): n is a, c, g, or t
  misc_feature (783)..(783): n is a, c, g, or t
  misc_feature (785)..(785): n is a, c, g, or t
  misc_feature (787)..(787): n is a, c, g, or t
  misc_feature (789)..(789): n is a, c, g, or t
  misc_feature (792)..(792): n is a, c, g, or t
  misc_feature (796)..(796): n is a, c, g, or t
  misc_feature (798)..(798): n is a, c, g, or t
  misc_feature (800)..(804): n is a, c, g, or t
  misc_feature (807)..(807): n is a, c, g, or t
  misc_feature (810)..(810): n is a, c, g, or t
  misc_feature (815)..(815): n is a, c, g, or t
  misc_feature (821)..(821): n is a, c, g, or t
  misc_feature (825)..(825): n is a, c, g, or t
  misc_feature (834)..(834): n is a, c, g, or t
  misc_feature (839)..(840): n is a, c, g, or t
  misc_feature (843)..(844): n is a, c, g, or t
  misc_feature (846)..(847): n is a, c, g, or t
  misc_feature (851)..(851): n is a, c, g, or t
  misc_feature (853)..(853): n is a, c, g, or t
  misc_feature (855)..(855): n is a, c, g, or t
  misc_feature (857)..(859): n is a, c, g, or t
  misc_feature (863)..(864): n is a, c, g, or t
  misc_feature (866)..(867): n is a, c, g, or t
  misc_feature (873)..(873): n is a, c, g, or t
  misc_feature (881)..(881): n is a, c, g, or t
  misc_feature (885)..(886): n is a, c, g, or t
  misc_feature (892)..(892): n is a, c, g, or t
  misc_feature (897)..(899): n is a, c, g, or t
  misc_feature (901)..(901): n is a, c, g, or t
  misc_feature (911)..(911): n is a, c, g, or t
  misc_feature (915)..(915): n is a, c, g, or t
  misc_feature (919)..(920): n is a, c, g, or t
  misc_feature (924)..(924): n is a, c, g, or t
  misc_feature (927)..(929): n is a, c, g, or t
  misc_feature (948)..(948): n is a, c, g, or t
  misc_feature (956)..(956): n is a, c, g, or t
  misc_feature (959)..(959): n is a, c, g, or t
  misc_feature (961)..(961): n is a, c, g, or t
  misc_feature (965)..(965): n is a, c, g, or t
  misc_feature (976)..(977): n is a, c, g, or t
  misc_feature (979)..(980): n is a, c, g, or t
  misc_feature (983)..(983): n is a, c, g, or t
  misc_feature (991)..(991): n is a, c, g, or t
  misc_feature (993)..(993): n is a, c, g, or t
  misc_feature (995)..(995): n is a, c, g, or t
  misc_feature (1004)..(1006): n is a, c, g, or t
  misc_feature (1010)..(1010): n is a, c, g, or t
  misc_feature (1012)..(1013): n is a, c, g, or t
  misc_feature (1023)..(1023): n is a, c, g, or t
  misc_feature (1026)..(1027): n is a, c, g, or t
  misc_feature (1029)..(1029): n is a, c, g, or t
  misc_feature (1031)..(1031): n is a, c, g, or t
  misc_feature (1040)..(1041): n is a, c, g, or t
  misc_feature (1043)..(1045): n is a, c, g, or t
  misc_feature (1052)..(1052): n is a, c, g, or t
  misc_feature (1065)..(1065): n is a, c, g, or t
  misc_feature (1067)..(1067): n is a, c, g, or t
  misc_feature (1072)..(1073): n is a, c, g, or t
  misc_feature (1084)..(1084): n is a, c, g, or t
  misc_feature (1091)..(1091): n is a, c, g, or t
  misc_feature (1097)..(1097): n is a, c, g, or t
  misc_feature (1099)..(1101): n is a, c, g, or t
  misc_feature (1103)..(1103): n is a, c, g, or t
  misc_feature (1106)..(1106): n is a, c, g, or t
  misc_feature (1114)..(1114): n is a, c, g, or t
  misc_feature (1118)..(1118): n is a, c, g, or t
  misc_feature (1122)..(1122): n is a, c, g, or t
  misc_feature (1128)..(1131): n is a, c, g, or t
  misc_feature (1133)..(1133): n is a, c, g, or t
  misc_feature (1139)..(1140): n is a, c, g, or t
  misc_feature (1143)..(1143): n is a, c, g, or t
  misc_feature (1148)..(1148): n is a, c, g, or t
  misc_feature (1151)..(1153): n is a, c, g, or t
  misc_feature (1160)..(1160): n is a, c, g, or t
  misc_feature (1163)..(1163): n is a, c, g, or t
  misc_feature (1167)..(1167): n is a, c, g, or t
  misc_feature (1169)..(1169): n is a, c, g, or t
  misc_feature (1173)..(1175): n is a, c, g, or t
  misc_feature (1180)..(1180): n is a, c, g, or t
  misc_feature (1182)..(1183): n is a, c, g, or t
  misc_feature (1186)..(1186): n is a, c, g, or t
  misc_feature (1198)..(1198): n is a, c, g, or t
  misc_feature (1200)..(1203): n is a, c, g, or t
  misc_feature (1211)..(1211): n is a, c, g, or t
  misc_feature (1213)..(1213): n is a, c, g, or t
  misc_feature (1217)..(1217): n is a, c, g, or t
  misc_feature (1221)..(1222): n is a, c, g, or t
  misc_feature (1224)..(1225): n is a, c, g, or t
  misc_feature (1231)..(1233): n is a, c, g, or t
  misc_feature (1239)..(1239): n is a, c, g, or t
  misc_feature (1241)..(1241): n is a, c, g, or t
  misc_feature (1253)..(1253): n is a, c, g, or t
  misc_feature (1255)..(1255): n is a, c, g, or t
  misc_feature (1263)..(1264): n is a, c, g, or t
  misc_feature (1267)..(1267): n is a, c, g, or t
  misc_feature (1269)..(1271): n is a, c, g, or t
  misc_feature (1275)..(1275): n is a, c, g, or t
  misc_feature (1279)..(1279): n is a, c, g, or t
  misc_feature (1281)..(1281): n is a, c, g, or t
  misc_feature (1283)..(1284): n is a, c, g, or t
  misc_feature (1286)..(1286): n is a, c, g, or t
  misc_feature (1291)..(1292): n is a, c, g, or t
  misc_feature (1294)..(1294): n is a, c, g, or t
  misc_feature (1296)..(1296): n is a, c, g, or t
  misc_feature (1298)..(1298): n is a, c, g, or t
  misc_feature (1306)..(1306): n is a, c, g, or t
  misc_feature (1309)..(1310): n is a, c, g, or t
  misc_feature (1313)..(1313): n is a, c, g, or t
  misc_feature (1315)..(1315): n is a, c, g, or t
  misc_feature (1323)..(1325): n is a, c, g, or t
  misc_feature (1331)..(1332): n is a, c, g, or t
  misc_feature (1336)..(1336): n is a, c, g, or t
  misc_feature (1340)..(1340): n is a, c, g, or t
  misc_feature (1345)..(1345): n is a, c, g, or t
  misc_feature (1347)..(1347): n is a, c, g, or t
  misc_feature (1366)..(1366): n is a, c, g, or t
  misc_feature (1371)..(1371): n is a, c, g, or t
  misc_feature (1375)..(1375): n is a, c, g, or t
  misc_feature (1379)..(1384): n is a, c, g, or t
  misc_feature (1386)..(1386): n is a, c, g, or t
  misc_feature (1392)..(1392): n is a, c, g, or t
  misc_feature (1398)..(1398): n is a, c, g, or t
  misc_feature (1402)..(1403): n is a, c, g, or t
  misc_feature (1406)..(1406): n is a, c, g, or t
  misc_feature (1409)..(1409): n is a, c, g, or t
  misc_feature (1411)..(1412): n is a, c, g, or t
  misc_feature (1415)..(1415): n is a, c, g, or t
  misc_feature (1428)..(1428): n is a, c, g, or t
  misc_feature (1434)..(1434): n is a, c, g, or t
  misc_feature (1436)..(1439): n is a, c, g, or t
  misc_feature (1441)..(1442): n is a, c, g, or t
  misc_feature (1444)..(1444): n is a, c, g, or t
  misc_feature (1446)..(1446): n is a, c, g, or t
  misc_feature (1457)..(1457): n is a, c, g, or t
  misc_feature (1462)..(1462): n is a, c, g, or t
  misc_feature (1465)..(1465): n is a, c, g, or t
  misc_feature (1467)..(1468): n is a, c, g, or t
  misc_feature (1471)..(1471): n is a, c, g, or t
  misc_feature (1473)..(1473): n is a, c, g, or t
  misc_feature (1476)..(1476): n is a, c, g, or t
  misc_feature (1480)..(1480): n is a, c, g, or t
  misc_feature (1482)..(1482): n is a, c, g, or t
  misc_feature (1489)..(1489): n is a, c, g, or t
  misc_feature (1498)..(1498): n is a, c, g, or t
  misc_feature (1500)..(1501): n is a, c, g, or t
  misc_feature (1503)..(1504): n is a, c, g, or t
  misc_feature (1510)..(1510): n is a, c, g, or t
  misc_feature (1513)..(1513): n is a, c, g, or t
  misc_feature (1520)..(1520): n is a, c, g, or t
  misc_feature (1529)..(1529): n is a, c, g, or t
  misc_feature (1531)..(1531): n is a, c, g, or t
  misc_feature (1533)..(1533): n is a, c, g, or t
  misc_feature (1535)..(1535): n is a, c, g, or t
  misc_feature (1537)..(1537): n is a, c, g, or t
  misc_feature (1542)..(1542): n is a, c, g, or t
  misc_feature (1548)..(1548): n is a, c, g, or t
  misc_feature (1554)..(1554): n is a, c, g, or t
  misc_feature (1558)..(1558): n is a, c, g, or t
tgaatagagagaattactatgagaggatcgcatcaccatcaccatcacgggatcctatttaggtgacactatagaatcgtcgacccacgcgtccgcggacgcgtgggggagcatcccctgtccctgtgtgagcaggtggcccccatcattgacctcatggccgtcagcaatgcgctttttgccaagctccgggacttcatcaccctgcgtctgcctcctggcttcccagttaanattgaaatcccgatcttccacatcctcaacgcccgcatcaccttcgggaacctcancggntgcnacgaaccggtgccatcngtgcgaggcagccccagcagcgagacgccttccccaggcagcgactcctccagcgtcagcagctccagctccacgacctcctgccgcggctgcnanatcnccccagcgttgttcgaggccccncgcgnntacnnncatgangggctggcnancgggnggcngtanacccggnnnnacaaanannancctgctgcaattnnnanatctngaagagcctgcnnnannacgnttagagagtattnnccnnaanaaaaatnnnaggancgcnnntaaananaagttnannncnnaggaaataacnnctcatgntanntaaagaangttatcnatcanggactantcncnaatgtncanctngnganannaanannnaaccctnccnagaaaangntcatnttnntttncaaaanttananancatantcgntaaaacccataagaaagcnnatnancanncgnaaacccncntntntntcnaaananannnnnatnagnccatncactanttanccctttcanagttnnaannannaaangnantnnncttnnanncatttnccaactcngatnnataaanttatnnnantataaccaanaaantttnnaacnctnnnatatcgcataaaacaccanccacccanatnanaaanataatttttannanncanaatttctntnancaaaaaacnnnttananncttctttaanganncnanacttgattnnannngtaaaanatattcaacaaantnttttnnttcacctatanaaataantgtaanannnanaantataattnaaanatantgaatnnnnantcttcnncanctcanacnnntaaaaanctntaananctannncttanannctnctataaatatangnnnnatatgatntnaatnatcnnannacttannnattatnancatattagagtncnataaatannctnannnacanaaantntnncntgaanntnantnaataattntgnntanantcaactannnggaatnnatantttnttctnanaccaaataaattaaataanattcncgcncttnnnnnntnaatcanctattntaanntcnttngnnttnaattattaaatanctcttnannnnannantntcataaaatantccanttntnnctntnaantcanancagaatnatcattatnanntnngatatnatnttgttanatcttaatnangntnanccaanctctcnataatnttgnctt

SEQ ID NO: 395 - DNA, 256 bp, Homo Sapiens
  misc_feature (6)..(6): n is a, c, g, or t
tagagnaattactatgagaggatcgcatcaccatcaccatcacggatcctatttaggtgacactatagaatcgtcgacccacgcgtccgctggtgagagactacgggagggacagacacttcgggactcaatgcttaagtatccagatagtcaccagcccaggatctttgggggggtcttggagagtgatgcaagaagtgaatccccccaaccagcaccagactggggctcccagaggccatttcataggtttgat

1. Use of marker sequences for the diagnosis of multiple sclerosis, wherein at least one marker sequence of a cDNA selected from the group SEQ 1-395 or respectively a protein coding therefor or respectively a partial sequence or fragment thereof is determined on or from a patient to be examined.

2.-18. (canceled)
